United States Patent Application Publication US 2026/0263503 A1, published September 10, 2026 (application 19/455,543).

The application's sequence listing, which the Patent Office published only in electronic form, follows.

SEQUENCE LISTING (2051 sequences)

SEQ ID NO: 1 - RNA, 2587 nt, Homo sapiens
  source 1..2587: mol_type = mRNA
atcccatgagcgggcagcagggtcagaagtggcccccgtgttgcctaagcaagactctcccctgccctctgccctctgcacctccggcctgcatgtccctgtggcctcttgggggtacatctcccggggctgggtcagaaggcctgggtggttggcctcaggctgtcacacacctagggagatgctcccgtttctgggaaccttggccccgactcctgcaaacttcggtaaatgtgtaactcgaccctgcaccggctcactctgttcagcagtgaaactctgcatcgatcactaagacttcctggaagaggtcccagcgtgagtgtcgcttctggcatctgtccttctggccagcctgtggtctggccaagtgatgtaaccctcctctccagcctgtgcacaggcagcctgggaacagctccatccccacccctcagctataaatagggcatcgtgacccggccgggggaagaagctgccgttgttctgggtactacagcagaagggtatgcggaagcgagcaccccagtctgagatggctcctgccggtgtgagcctgagggccaccatcctctgcctcctggcctgggctggcctggctgcaggtgaccgggtgtacatacaccccttccacctcgtcatccacaatgagagtacctgtgagcagctggcaaaggccaatgccgggaagcccaaagaccccaccttcatacctgctccaattcaggccaagacatcccctgtggatgaaaaggccctacaggaccagctggtgctagtcgctgcaaaacttgacaccgaagacaagttgagggccgcaatggtcgggatgctggccaacttcttgggcttccgtatatatggcatgcacagtgagctatggggcgtggtccatggggccaccgtcctctccccaacggctgtctttggcaccctggcctctctctatctgggagccttggaccacacagctgacaggctacaggcaatcctgggtgttccttggaaggacaagaactgcacctcccggctggatgcgcacaaggtcctgtctgccctgcaggctgtacagggcctgctagtggcccagggcagggctgatagccaggcccagctgctgctgtccacggtggtgggcgtgttcacagccccaggcctgcacctgaagcagccgtttgtgcagggcctggctctctatacccctgtggtcctcccacgctctctggacttcacagaactggatgttgctgctgagaagattgacaggttcatgcaggctgtgacaggatggaagactggctgctccctgatgggagccagtgtggacagcaccctggctttcaacacctacgtccacttccaagggaagatgaagggcttctccctgctggccgagccccaggagttctgggtggacaacagcacctcagtgtctgttcccatgctctctggcatgggcaccttccagcactggagtgacatccaggacaacttctcggtgactcaagtgcccttcactgagagcgcctgcctgctgctgatccagcctcactatgcctctgacctggacaaggtggagggtctcactttccagcaaaactccctcaactggatgaagaaactatctccccggaccatccacctgaccatgccccaactggtgctgcaaggatcttatgacctgcaggacctgctcgcccaggctgagctgcccgccattctgcacaccgagctgaacctgcaaaaattgagcaatgaccgcatcagggtgggggaggtgctgaacagcattttttttgagcttgaagcggatgagagagagcccacagagtctacccaacagcttaacaagcctgaggtcttggaggtgaccctgaaccgcccattcctgtttgctgtgtatgatcaaagcgccactgccctgcacttcctgggccgcgtggccaacccgctgagcacagcatgaggccagggccccagaacacagtgcctggcaaggcctctgcccctggcctttgaggcaaaggccagcagcagataacaaccccggacaaatcagcgatgtgtcacccccagtctcccaccttttcttctaatgagtcgactttgagctggaaagcagccgtttctccttggtctaagtgtgctgcatggagtgagcagtagaagcctgcagcggcacaaatgcacctcccagtttgctgggtttattttagagaatgggggtggggaggcaagaaccagtgtttagcgcgggactactgttccaaaaagaattccaaccgaccagcttgtttgtgaaacaaaaaagtgttcccttttcaagttgagaacaaaaattgggttttaaaattaaagtatacatttttgcattgccttcggtttgtatttagtgtcttgaatgtaagaacatgacctccgtgtagtgtctgtaataccttagttttttccacagatgcttgtgatttttgaacaatacgtgaaagatgcaagcacctgaatttctgtttgaatgcggaaccatagctggttatttctcccttgtgttagtaataaacgtcttgccacaataagcctccaaaaaaaa

SEQ ID NO: 2 - DNA, 16101 bp, Homo sapiens
  source 1..16101: mol_type = genomic DNA
catcagaaagatccaccctcatgattcaattacctcccactgggtccctcccatgacacatgggaattatgggagctacaattggagatttgggtggggacacagccaaaccatatcagatggcttatttggtttctatgtagaacctctgcttttcattcaacagtcttcatttagccacagataagctctgtccctaacttccactgatggaatgtacacataagaaacttccactgatggaatgaacacagaaggtgcctactgggaagaaaactggcctgaatctgagctgggtcaaatgtctgcagtcagtttgaatggctgctccttatgggaataatttacattctcaataaaattctctagcaattttctgattgattttaatgagctttaaagccttacgtagaagatcccccagctgatagtcagccttgggcatggattaagggcttttaaccaatcttgcaacaagtttaagcagatattctttattgggtccaatctaaccaaaattattttcttatgttctccccagtaacgtgtcattattaagagaagtttggcttgcttagaggccaaatttagagggtcctgaaattttattttcttttacaccactttccagcatgttacctgatcagttgtttattatctttgctgttgaatggagtgatcattccaagggcccgaggcaggaggcccaggcacagtggaaactctcccaaagaccaggatctttgttttgttccctgacatatgctgagcaccaggaatagtgagtgaatgaaacaaattgtgaggctttaaagagccgaaatatttaaacactgggcacaaggttgttgcttaatcagtgctagatccttacctcccccttgtgtccaggtggacttgttactgcagttaaaccacttgctgatcctcaaacaactagttagtggcacagccaggcctaggaccccagtctctactgttccaactaacccattcgcaggcaggagcactttgaatggtctcttattttaaaaaaattaaattaaaattgtctatttatttagagacagagtcttactctgtagcccaggctcgagtgcagtggtgcaatcatagctcactgtaacctccatctcctggcctcaaaaagtgtttgaattacagatgcgaggcactgtacctggcccgaatgttctgttcagacaaagccacctctaagtcgctgtggggccccagacaagtgatttttgaggagtccctatctataggaacaaagtaattaaaaaaatgtatttcagaatttacaggcccatgtgagatatgatttttttaaatgaagatttagagtaatgggtaaaaaagaggtatttgtgtgtttgttgattgttcagtcagtgaatgtacagcttctgcctcatatccaggcaccatctcttcctgctctttgttgttaaatgttccattcctgggtaatttcatgtctgccatcgtggatatgccgtggctccttgaacctgcttgtgttgaagcaggatcttccttcctgtcccttcagtgccctaataccatgtatttaaggctggacacatcaccactcccaacctgcctcacccactgcgtcacttgtgatcactggcttctggcgactctcaccaaggtctctgtcatgccctgttataatgactacaaaagcaagtcttacctataggaaaataagaattataacccttttactggtcatgtgaaacttaccatttgcaatttgtacagcataaacacagaacagcacatctttcaatgcctgcatcctgaaggcattttgtttgtgtctttcaatctggctgtgctattgttggtgtttaacagtctccccagctacactggaaacttccagaaggcacttttcacttgcttgtgtgttttccccagtgtctattagaggcctttgcacagggtaggctctttggagcagctgaaggtcacacatcccatgagcgggcagcagggtcagaagtggcccccgtgttgcctaagcaagactctcccctgccctctgccctctgcacctccggcctgcatgtccctgtggcctcttgggggtacatctcccggggctgggtcagaaggcctgggtggttggcctcaggctgtcacacacctagggagatgctcccgtttctgggaaccttggccccgactcctgcaaacttcggtaaatgtgtaactcgaccctgcaccggctcactctgttcagcagtgaaactctgcatcgatcactaagacttcctggaagaggtcccagcgtgagtgtcgcttctggcatctgtccttctggccagcctgtggtctggccaagtgatgtaaccctcctctccagcctgtgcacaggcagcctgggaacagctccatccccacccctcagctataaatagggcatcgtgacccggccgggggaagaagctgccgttgttctgggtactacagcagaaggtaagccgggggccccctcagctccttctcggtcttgtctctctcagatgtaactgagctgtgggctaggaggaaaaggccgggaggaggcacggtgatgactgaaaaacctctcccctctcataagaccagtcatccggacgcgggctttcccccactcggtgcccacctggggtcttacaggaggagctgctcctcctcagcaataggacaagatggtcaggtcttcctgcttccgctgagaaaagttagggtcctcaggaacggagcagactggtacaggaacagagtcatcatggccaagagtccaccgggtcctcttgccatcaggaggaatagcagggcttgtgcaggaattggggctggagggaagggccgggctcggtcagtctccagctgggatccccagagtggtcaccctacccctccctcgagacagactgcctgactgtgtgtcatcaggctggtcaccatctccctgaacctcgatttgctcacctataaaatggaactaataacgatgcctgggctccctgtctcaggggctctggtatagctgaagagaactaatataacatgaaagtgctttctaagctttgggataagctaaaaggcagattccaattttattcgagggcagcgtagattggtgcttcagctcgtggatgacagagtcagggggcctggttctgagtcctagttctgtctcttcccagctgtgtgacgttgaacaagtcactggacctctctgttcctctgcaaaacagcatgaaccaattcattaactacttctccaggatgcagtaggtcccagggactatcctaggaatgtgggctgtattagtaaacacaacagcgggaaccctgttccggggctcacattcacatcagagcaaacagacaaagacgctggacagaataagtgcataactacatggtacagagggttataaggagggaaaaggggagctggatgagagagttgagagtgcccggtgtggtggggaaagctgcagggtgaaatactgcatcagggaaacctcagggaaggtgaggactatggtgaggtcagaggggttgatatgagaacagtgccctgcaaatggcaggcaccacaggagcatgagccgtcatcttcacctttagcattcagcccgggagaagtagggagacatagaaggggcaggtgctggccaagaggcaggggcaggagaggagaaggcggaggggcactcagggcgagggtgtcaggcccgccaccccagagcaccattactcccaggacgcggctgcgtgcagacctggaaccagcctagggagcagccgcagatcacaactgagaacaaacgacagtctctgcctcaaaaatggcccatggaattgcgtctctggagacgctgcctgagcaggagcagcacagtgagcgggctgcatcgaccagcgccatccaaaccccgaacagttggcgcttgtcaggcaggacttcccagcagtcggttcccacaggtttcccctgttgacctgatttgatgtgactgtctagattaggtgtgaactggtggcttaggcttctctgcacagaaaggcctgcaagcagcagagagagttttctgttccatttttccatgtcatgtggctcttcctgagaacagcggatggagtcaaatgcatggggagtggggtgagatggtagctgaggtcagaatttggcatttgaatgactgaagcagaacaaaacacaccaggtacttcagcagctgcaccgtgttgagggcaggtgctggttacgggtctgggtgagggaagccagctgccaatgtaagaagaatgactgggtatgcttagatgaagcagaaaaatctaggcatcaaggtggccttgagtcagtgatgacacgctacagctccaaggaagcctggcctagccctggggggacagaaaaggccaagaagtgacgatattgcagtacacccccctccacaagaaatgagtgagatgtggtacaaaatgttagaattgaatgaatcaatagaataaacgttcatcccttcaatcaagaagagtcagatgaaatgaattagcagggccagcccaagaacctcttctgggggtctcagggtagctttcatttgtagcagctgaggctgaagcccagctgcaaggcctttgagagaacgtggtgctggacccgtgtctagggcaggggttctaaaccctgcttacatatcagagtcacctgagaattttctatttttttttttttttttttatacgtggtcccagcacagactaaggaatccaactatcattgggcaagccatgctaggtatgcatgcctttggggctctgcaggggatagcgctatgcagggatggttgagagctggttttggggttgagacacgtgggaaatacttggactttgggctgagcctgtggtgctcaatcccggctgcatgttgggaccacagggagatgacaaaaccatccccagccctcaccctagggccctcgaatgagcatctcaggggtctaggaggcctccacaaagacctactgattggcacacacttgtttctctaggaagagaacttacagctgcaggcaggagcatgtcttaatctgcttgggctgccataagtaccacagactgggagggtttaacaacagaaatgtgttatctcacagttctggaagctagaagcctgggagccagccatcagcagagttggtttcctctgggtcctctatccttggcttgtagatggccgtcttctctctgtgtccccacatggtcttccctctgtgtccccacatggtcttccctctgtgtgtgtccatgtcctcatctcctcttctcataaggacacaggtcatattagatcagggctcaccctcatggcctcattttaacttaatcatctctttaaagatcctgtctccaaataatggtcacattctgaggtcctggggttgaggacttcaacacgggcattatggccgttgggggaggtaggacataattcagctgatattggtgcattttgcacttggatcatgtagatattttccatggagctttgaatccatttcttcttttttttgtagacatgaatggatttattctgggctaaatggtgacagggaatattgagacaatgaaagatctggttagatggcacttaaaggtcagttaataaccacctttcaccctttgcaaaatgatatttcagggtatgcggaagcgagcaccccagtctgagatggctcctgccggtgtgagcctgagggccaccatcctctgcctcctggcctgggctggcctggctgcaggtgaccgggtgtacatacaccccttccacctcgtcatccacaatgagagtacctgtgagcagctggcaaaggccaatgccgggaagcccaaagaccccaccttcatacctgctccaattcaggccaagacatcccctgtggatgaaaaggccctacaggaccagctggtgctagtcgctgcaaaacttgacaccgaagacaagttgagggccgcaatggtcgggatgctggccaacttcttgggcttccgtatatatggcatgcacagtgagctatggggcgtggtccatggggccaccgtcctctccccaacggctgtctttggcaccctggcctctctctatctgggagccttggaccacacagctgacaggctacaggcaatcctgggtgttccttggaaggacaagaactgcacctcccggctggatgcgcacaaggtcctgtctgccctgcaggctgtacagggcctgctagtggcccagggcagggctgatagccaggcccagctgctgctgtccacggtggtgggcgtgttcacagccccaggcctgcacctgaagcagccgtttgtgcagggcctggctctctatacccctgtggtcctcccacgctctctggacttcacagaactggatgttgctgctgagaagattgacaggttcatgcaggctgtgacaggatggaagactggctgctccctgatgggagccagtgtggacagcaccctggctttcaacacctacgtccacttccaaggtaaggcaaacctctctgctggctctggccctaggacttagtatccaatgtgtagctgagatcagccagtcaggccttggagatgggcagggggcagccctgcggacatacctggtgaccacccttgagaagtggggaagtggctgctccgctgggtccctggatgggccgtccacctcctggacctgctgccctactatgtgcacgactatacaacatcctttttcttacatcatttaatccccttatgatgtggtgaagaggtatttgtgcctttgtttaccagtgaagaaatagagactcggagaaacaaagtgccttgctcaagatggcacagccaccagtgggggtcctgggattgaaacccacatctcctggccccacagcccagttctacactcagaagggtcaggttcatatctcttgagaaggtcaggaactggggtccctggcccatgcagaaataagcaattggcttgcttaaatccctttcatgttaggaggggcattactgaaaaccctctactacaaagattgttgatttttttttttttttttattgagacagggtcttgttctgtcacccaggctgcagtgtagtggtgccatcattgctcactgtagccttgaactcctggcctcaagcgatcctcccacctctgccttccaaagtgttgggattaaaggtgtgagccactgcacccagccacagattgcttaaagcattcatttaacaaatacttgttgaggatttgctacttgtaagactttaagcctggcatctcagaggaggccagaggagggctgtataggccctgcctccaggcttttaaaggtcaatgggcaaatgcctaggatttggagctgcagggaaacgtgctccacaaggtaactcagggaagcctcggggctctcagaggacagaggtcactggggagcggagagcaggccttgcctggcagtgagggcaacagggctggtgaagctaggagcaagcatgatgagcccagcctgcagagtttggggcaaggaacgaggatggggcggttggcttggcatgagtgttgaaccagaaaatgggcctggggagggcagagctggagacactttgaacgccatgcttggtaggtgtgggaatggggacgcgttctgttcagaggtcatcccggaagcctgccgtgtgcagactggaggcagggaggattgtttgaaggttacgcaagagtccaggcacacagtcacgggaacacgtgctcagggagcagctcggcaaatccatgggtggggtggggctgaggggtgtgtctaagagacactgaggaggctctgtcaagatgttaacctcgtgagggacagagagccaggcgggaggtgaaagacaagactgtggagaaagaggttcagtggcgcatagtgatttttcttaccacaacaacctccttgaggtctttcccttcgggttcagggagaggtgatagatggggggattgctcagccctggcactgactggtcacaggggcagaggccagcccgagggttgcccggttgagggtggcagcacactgtgcagggcagagcagggacacatggacttagcctgctgtccctaggagaagtgctgggaggagcgctcactgagaaggagggtcctgcagaaggcaaaggcaagaaagccagtggcatctgaaatgggtctcccttcgaaagagagcacatccacctgacccagaccgcagagccaggccaggaggaagaggaggaagaataaaaaagccaaccacatcgggactcaaaggaagcccaggatcctcgccggcctccaccgcatgctgccctgaccctgccccacttcctaactttgctggcctcagtttccgtcaaaggaggcagccacttcctgcccacatggtctgtccagtgaggagatcgggggctgtctcgggacctctaggtttccctttagcaatgatgttctatttacatgacctcagcaggcagctagatgtgtcccactagagaggacctgaggatctggggcctgatgggctccagggtaccgtctgcccagtgcttgctgtgctcctgagcatggggcgctggccctggtggtttccatgacaccaggtcctgacttgacctcgacagatttacctagcctccggatgagaatggtgagctgtgcatgtcagacgagcagagggaagacggcagccactctcatgtcaaatcccagcgtcttttgggaggcagcttcccttttttagtttagtttgttggaagaaaagaattgtccctttcccccctctaaactaaaagccttgccagcccaggtgggcagcaccgaggtccctgcagggaacgtgcaaggggaaccctgcagtttcccgctcacatgcccttccgagactgagtgctccgaggactgaggacgagaaatatgccaggtctgccactgccttcttacgagacccggacccaggggaggcacagccatgcccagctcctgcctgccagttctgtcctcccagctgccctactttcatgctgggacctccaattcagtacaaagggagacctcactgtttctgaaccatctctactcagactcccaagtgccacgtgcccaggggactgttctgtgacaaacttatacacaacttcaccctattctcctaagaacaaccgcagaataggcctttcaggatgagtgggaggacagccgagggcagggatgtgctagtgtaaggtcgaggcagagggtgggctgctgtcatggaaagaccccaggtaactgcgtcacacacaaatttgtgtccttctcccacaacgggctctcccgagttctctgtcatctgcacggccctgtgagcaggaggggaaacagagggctcacccctgcccccaaggcccagtgtgcaaatccattcatcacaacgaggttgtgtgagtctccccagtagcaagggctgctgaggaatggagccctcgtttccggggcctgcgtggcccactctgtattctatgactgtgatgggggagggtgggggccacaggacagctggtgggctctgccatggctggggctagacatggattaaaaagtgagtatgagcaggggcctctaggagtggtgggatagtgcggtggtggccacatgtcattctacgtgcgtccaaacctacagaatgtaaaacaccaggagggagactcaaagaaaactatcaactttgagtgctgaggacgtgtcagtgtaggttcgtcagttgcaacaaatgggccacgctggtgtgagatgttgatcacgggggaggctgtgtagtgggggacaagagttatatgggaactttctgtactttctgctcgattttgctgtgaacctaaagtcactctaaaaaataacatctcttaaattttttaaaaagtgagtgtgtcaaaccacagcctttgggtcaggacagttctaggtttgagttgacctggcaggtaccagtggcttatgtcccttaaggtgacagatgcaaaacccccggtttggtgcctggcatgttgtgtgtcttgcaggtggcggttagggctgcctcagtgaactcaaatggctgcattttacaggagaaatatttgagccacacttgcggtcctgtggccaggagaatgcagagtggcctggggggggccaaggaaggaggctgaggcagggcgaggggcaggatctgggcctttggtgtctgccagccctcattcctgcccctgtcttgggtgactcttccctccctgtctcctgtctggatttcagggaagatgaagggcttctccctgctggccgagccccaggagttctgggtggacaacagcacctcagtgtctgttcccatgctctctggcatgggcaccttccagcactggagtgacatccaggacaacttctcggtgactcaagtgcccttcactgagagcgcctgcctgctgctgatccagcctcactatgcctctgacctggacaaggtggagggtctcactttccagcaaaactccctcaactggatgaagaaactatctccccggtaggagcctcccggtctcccctggaatgtgggagccacactgtcctgcccaggctgggggcggggtggggagtagacacacctgagctgagccttgggtgcagagcagggcagggccgcggtggcacggggctgggcaggcggcctgtgtgtctgtctaccagtcctctatccagccagcacccagctctccagttagtgtctgtctttcaagtgcaggcaaggtaaaggaggagaggaagaatgctttttctacacttacacttgcctggtagttttggagggggagaaaacattgcaatccgccctctgagagaggaccattttggtcccacacctgacacacagcacacctgtgacatccaagagcttcttggaactgacttgccaggagggttcggacttcgcgtgagcgggggtggggccttctcagggagcgtcccttgactccagaacgcccttgctggcggctggcggctgggtggggataggtgttgttagctcctctttcctgctgcaattcctttccacagagccctggactcaaactacacatcaccccagatcatcgaggcctggaaatctgctcccagaggcaggcattgagtgacacgatggcttgacatcaactctgggtgttttttatgttttaaaaattgtgatggtaaaatatacgtaacaaaatttgccatcgtaaccattttcgagtgcacagttcagtggtactaggcccattcacactgttgtgcagccatcacccccgtccatctccatttatcttctcaacttcccaaactgaagctctgtcctgctgaaacactaactctccatttccccttccccttggccccggcaaccaccacgatgtcctcgaggttcacccatgttgtagcacatgtcagaatgtccttccttttgaaggctgaataatattccattgcatgtggttaccaccttttgtgtatccactcatccatcgatggacacgtgggttgcttccacctttgagctgctgtgaatagtgcagtgtaccctgtaaacatgggtgtactgtcagctcttataagtgcttgatacatcactggaaatgtccatgggctctgaaggatgccaaaagatggaagaggctctatacgaagatcaatcgagttgacatagcaacgtgtccagcacgaggttgacactgtaccctcctgcctctctccttttcatgggtgtcatgtcatcaagaacactgctgtggcagtagtaagacacagtgcattatttcagagaatagcatttaaaaattacccaagtaacacaccttcaatgcagccaacctaaaaacagaatgcaccaaaggacaaccattcctaggtcctcatcggtaaatcttctatgtccctcacatagtattgcaaatgacatgaaggatttttattgtaggttttgctgaaattttccccaagggggaggatgacttagttgggtgatggggggagcaaacatccctgtcgtcagggttgggtgcaaggagcataagcctgcctggcctctgggagagccctcactgtgtggcctggagccttcctaactgtgcatcatctccccaggaccatccacctgaccatgccccaactggtgctgcaaggatcttatgacctgcaggacctgctcgcccaggctgagctgcccgccattctgcacaccgagctgaacctgcaaaaattgagcaatgaccgcatcagggtgggggaggtatgtgtgagcctgtgtctgtgcctgacctgggttccaagtgtgcacagggtgggaggcatggatgtaagggacacagaggaggctatgggtggggccagcagggcaagagggagcggagagtagggccaaaggtgggagagaagtagccagagcattctggggccttccaggtgcagagcagcaaatccctccccatccctgctgtgcctcctcctgctaggtgtgtgttccatggtcctgcttggccttgccttgcctcagggtcctccagggttcctatagtggagttgaaaccgggatgaagacagcaagcacccctggacctggtgccctgggcccagccccttcttcagggaaatgctgagcagcagacagaatgtccccctgccatgtggcaccatgcacatctgcagctaccaaggatgtgccttgatgttctgggccctgtgctcagtgctggggagaaagtgggagttcttacgggggccagcgggaagagccctctgtgctaagttagctaagccctggcactggtgggccatggccaagggagccaggaattctgcctgggacatcagggcagaatgtgaagatgggaggatgtaaggggtgtgttagggaggagccggcatgtgagtttggccattgtggccaattaacggtcatctacacacagacacacccttgcctacactgaggggcaggcatacactgtgcatcctcctggcaggctggaaaatgtccccctccaggacagtgcacagcacagaggtcctgagcccaccccggccctctagccctcagcaccctgggtcacccagtgcgccctcagaatgatcctgatgtctgctgctttgcaggtgctgaacagcattttttttgagcttgaagcggatgagagagagcccacagagtctacccaacagcttaacaagcctgaggtcttggaggtgaccctgaaccgcccattcctgtttgctgtgtatgatcaaagcgccactgccctgcacttcctgggccgcgtggccaacccgctgagcacagcatgaggccagggccccagaacacagtgcctggcaaggcctctgcccctggcctttgaggcaaaggccagcagcagataacaaccccggacaaatcagcgatgtgtcacccccagtctcccaccttttcttctaatgagtcgactttgagctggaaagcagccgtttctccttggtctaagtgtgctgcatggagtgagcagtagaagcctgcagcggcacaaatgcacctcccagtttgctgggtttattttagagaatgggggtggggaggcaagaaccagtgtttagcgcgggactactgttccaaaaagaattccaaccgaccagcttgtttgtgaaacaaaaaagtgttcccttttcaagttgagaacaaaaattgggttttaaaattaaagtatacatttttgcattgccttcggtttgtatttagtgtcttgaatgtaagaacatgacctccgtgtagtgtctgtaataccttagttttttccacagatgcttgtgatttttgaacaatacgtgaaagatgcaagcacctgaatttctgtttgaatgcggaaccatagctggttatttctcccttgtgttagtaataaacgtcttgccacaataagcctccaaaaattttatctttcatttagcagccaaacagatgtatacaattcagcagatagactgtgcaaacgaaagtgctttcctggactttggatggaatttccatgggaggtctgagccagtacttagcagtcctttgaagttttaggtgatgcttttctctggacacttccattggtaagcagtggtggccatctgtgtgatggacagggggcgggaagagggtgacagggaaggccccataccccatgtggcacctgggaaaggaaccaggcagatgggacttcttccgtcctggtgacacagggccagactgctgctggtattgtgccccgggagtggaaggtagagaaataaatcttcacaaataaatatttgcaattttcccccatctgttgagtgcctctgcctgctcctcctcgatgggattaggcccacagttcggaatcttggggagagccaaggaagcggtaggcacccagtaggcccacggccgtcggctgatagcaatggtgatgctgtcctacctacttgtgtaaggcattcgatcttcctcccttccatacatattgaaataaataagccgcgcaatgtgttagctattgatcagaactaaagtgaagtcagccacggggattacaaatctcggcttctcccctcatgttcctgagagtcttcccctggttttgaacacatctccctagctcgatgtcaaggtgagggattctgtcggcaacagcagtgcccttagttgcttcgtcgtaactccccgtcaccggttttattcagttaccttccagtcccactctcagagcttcctggcttgttctgctctcaaagcgggtagagctggcacacatggactctccgaaacggctgcaagatgccaagtttctcggaagaactggaagcacagagaccagaagtgccttaaggtctcgctattcagtgtggcgcttagaccggcagtggcggcagctgccctgggagcttgttagaatgtggcttctcacgcccctcctggacctacagagtcagaatctgcagttttacaggaggtccaggcttggaagttgctcgtagagacctgagacagcgcagccacgtgctggaaacaaagcatttaagtttgtgactttattttaaaaggcagcaggcagtcgacaaaccaatttcttctacttagaggcggcttcggcttctggaagtcgctaggagtataaagttgccaaccagcgctgttctcccgctgttttctgtgcacttataaatgggaagttaggtcaggatagatctctcagctattacaaggatacaaaatacgaacattctacaagttacttaacacacacacacacacacacacacacacacacacacacaaaattaattccacaggtcagtttctctgaaacattttttcactaaattctaagtcttcctggagttgcaagtgcctatctcctagacaaggcaattactcaccaactaaaatcactgtcaatctgagatttcggctgggcatgagaccatggtcaggggatgctttgaacagcctctgaggaaattagtgagtttgaaaaatggaaagatttttattactcacttggcagtaaaacctgatggggacagacgtcaggctgtttaagatcctcagaagaaaaagttgatagtgtgaatattcctaaatttgccacacgaagatgtacatgtgattataaggtgctgttgcagaagcccctgggggtgttatgggatatacactatatgggccactttaccttcctaaaatctgaaaaacttcaactactgaaacatggactgaaggttttgaatagtggatggtgaatttgaataccatcccgtgtgatttttttttctagcagactttagttttttagagcagttttaagcccacaccaaaactgagaggaagatacagcaatttctcatataccccctactaccttccagtctcccccattattgacatcccccacccagagtggtccatttcttacaacccacgaacctacattgacacatcattattactc

SEQ ID NO: 3 - RNA, 1399 nt, Homo sapiens
  source 1..1399: mol_type = mRNA
agaagctgccgttgttctgggtactacagcagaagggtatgcggaagcgagcaccccagtctgagatggctcctgccggtgtgagcctgaggaccaccatcctctgcctcctggcctgggctggcctggctgcaggtgaccgggtgtacatacaccccttccacctcgtcatccacaatgagagtacctgtgagcagctggccctacaggaccagctggtgctagtcgctgcaaaacttgacaccgaagacaagttgagggccgcaatggtcgggatgctggccaacttcttgggcttccgtatatatggcatgcacagtgagctatggggcgtggtccatggggccaccgtcctctccccaacggctgtctttggcaccctggcctctctctatctgggagccttggaccacacagctgacaggctacaggcaatcctgggtgttccttggaaggacaagaactgcacctcccggctggatgcgcacaaggtcctgtctgccctgcaggctgtacagggcctgctagtggcccagggcagggctgatagccaggcccagctgctgctgtccacggtggtgggcgtgttcacagccccaggcctgcacctgaagcagccgtttgtgcagggcctggctctctatacccctgtggtcctcccacgctctctggacttcacagaactggatgttgctgctgagaagattgacaggttcatgcaggctgtgacaggatggaagactggctgctccctgatgggagccagtgtggacagcaccctggctttcaacacctacgtccacttccaagggaagatgaagggcttctccctgctggccgagccccaggagttctgggtggacaacagcacctcagtgtctgttcccatgctctctggcatgggcaccttccagcactggagtgacatccaggacaacttctcggtgactcaagtgcccttcactgagagcgcctgcctgctgctgatccagcctcactatgcctctgacctggacaaggtggagggtctcactttccagcaaaactccctcaactggatgaagaaactgtctccccggaccatccacctgaccatgccccaactggtgctgcaaggatcttatgacctgcaggacctgctcgcccaggctgagctgcccgccattctgcacaccgagctgaacctgcaaaaattgagcaatgaccgcatcagggtgggggaggtgctgaacagcatttttttgagcttgaagcggatgagagagagcccacagagtctacccaacagcttaacaagcctgaggtcttggaggtgaccctgaaccgcccattcctgtttgctgtgtatgatcaaagcgccactgccctgcacttcctgggccgcgtggccaacccgctg

SEQ ID NO: 4 - RNA, 1584 nt, Homo sapiens
  source 1..1584: mol_type = mRNA
agaagctgccgttgttctgggtactacagcagaagggtatgcggaagcgagcaccccagtctgagatggctcctgccggtgtgagcctgagggccaccatcctctgcctcgtcatccacaatgagagtacctgtgagcagctggcaaaggccaatgccgggaagcccaaagaccccaccttcatacctgctccaattcaggccaagacatcccctgtggatgaaaaggccctacaggaccagctggtgctagtcgctgcaaaacttgacaccgaagacaagttgagggccgcaatggtcgggatgctggccaacttcttgggcttccgtatatatggcatgcacagtgagctatggggcgtggtccatggggccaccgtcctctccccaacggctgtctttggcaccctggcctctctctatctgggagccttggaccacacagctgacaggctacaggcaatcctgggtgttccttggaaggacaagaactgcacctcccggctggatgcgcacaaggtcctgtctgccctgcaggctgtacagggcctgctagtggcccagggcagggctgatagccaggcccagctgctgctgtccacggtggtgggcgtgttcacagccccaggcctgcacctgaagcagccgtttgtgcagggcctggctctctatacccctgtggtcctcccacgctctctggacttcacagaactggatgttgctgctgagaagattgacaggttcatgcaggctgtgacaggatggaagactggctgctccctgacgggagccagtgtggacagcaccctggctttcaacacctacgtccacttccaagggaggatgaagggcttctccctgctggccgagccccaggagttctgggtggacaacagcacctcagtgtctgttcccatgctctctggcatgggcaccttccagcactggagtgacatccaggacaacttctcggtgactcaagtgcccttcactgagagcgcctgcctgctgctgatccagcctcactatgcctctgacctggacaaggtggagggtctcactttccagcaaaactccctcaactggatgaagaaactgtctccccggaccatccacctgaccatgccccaactggtgctgcaaggatcttatgacctgcaggacctgctcgcccaggctgagctgcccgccattctgcacaccgagctgaacctgcaaaaattgagcaatgaccgcatcagggtgggggaggtgctgaacagcattttttttgagcttgaagcggatgagagagagcccacagagtctacccaacagcttaacaagcctgaggtcttggaggtgaccctgaaccgcccattcctgtttgctgtgtatgatcaaagcgccactgccctgcacttcctgggccgcgtggccaacccgctgagcacagcatgaggccagggccccagaacacagtgcctggcaaggcctctgcccctggcctttgaggcaaaggccagcagcagataacaaccccggacaaatcagcgatgtgtcacccccagtctcccaccttttcttctaatgagtcgactttgag

SEQ ID NO: 5 - RNA, 1691 nt, Homo sapiens
  source 1..1691: mol_type = mRNA
aagaagctgccgttgttctgggtactacagcagaagggtatgcggaagcgagcaccccagtctgagatggctcctgccggtgtgagcctgagggccaccatcctctgcctcctggcctgggctggcctggctgcaggtgaccgggtgtacatacaccccttccacctcgtcatccacaatgagagtacctgtgagcagctggcaaaggccaatgccgggaagcccaaagaccccaccttcatacctgctccaattcaggccaagacatcccctgtggatgaaaaggccctacaggaccagctggtgctagtcgctgcaaaacttgacaccgaagacaagttgagggccgcaatggtcgggatgctggccaacttcttgggcttccgtatatatggcatgcacagtgagctatggggcgtggtccatggggccaccgtcctctccccaacggctgtctttggcaccctggcctctctctatctgggagccttggaccacacagctgacaggctacaggcaatcctggatgttgctgctgagaagattgacaggttcatgcaggctgtgacaggatggaagactggctgctccctgatgggagccagtgtggacagcaccctggctttcaacacctacgtccacttccaagggaagatgaagggcttctccctgctggccgagccccaggagttctgggtggacaacagcacctcagtgtctgttcccatgctctctggcatgggcaccttccagcactggagtgacatccaggacaacttctcggtgactcaagtgcccttcactgagagcgcctgcctgctgctgatccagcctcactatgcctctgacctggacaaggtggagggtctcactttccagcaaaactccctcaactggatgaagaaactgtctccccggaccatccacctgaccatgccccaactggtgctgcaaggatcttatgacctgcaggacctgctcgcccaggctgagctgcccgccattctgcacaccgagctgaacctgcaaaaattgagcaatgaccgcatcagggtgggggaggtgctgaacagcattttttttgagcttgaagcggatgagagagagcccacagagtctacccaacggcttaacaagcctgaggtcttggaggtgaccctgaaccgcccattcctgtttgctgtgtatgatcaaagcgccactgccctgcacttcctgggccgcgtggccaacccgctgagcacagcatgaggccagggccccagaacacagtgcctggcaaggcctctgcccctggcctttgaggcaaaggccagcagcagataacaaccccggacaaatcagcgatgtgtcacccccagtctcccaccttttcttctaatgagtcgactttgagctggaaagcagccgtttctccttggtctaagtgtgctgcatggagtgagcagtagaagcctgcagcggcgcaaatgcacctcccagtttgctgggtttattttagagaatgggggtggggaggcaagaaccagtgtttagcgcgggactactgttccaaaaagaattccaaccgaccagcttgtttgtgaaacaaaaaagtgttcccttttcaagttgagaacaaaaattgggttttaaaattaaagtatacatttttgcattgccttcggtttgtatttagtgtcttgaatgta

SEQ ID NO: 6 - RNA, 1670 nt, Homo sapiens
  source 1..1670: mol_type = mRNA
agggtatgcggaagcgagcaccccagtctgagatggctcctgccggtgtgagcctgagggccaccatcctctgcctcctggcctgggctggcctggctgcaggtgaccgggtgtacatacaccccttccacctcgtcatccacaatgagagtacctgtgagcagctggcaaaggccaatgccgggaagcccaaagaccccaccttcatacctgctccaattcaggccaagacatcccctgtggatgaaaaggccctacaggaccagctggtgctagtcgctgcaaaacttgacaccgaagacaagttgagggccgcaatggtcgggatgctggccaacttcttgggcttccgtatatatggcatgcacagtgagctatggggcgtggtccatggggccaccgtcctctccccaacggctgtctttggcaccctggcctctctctatctgggagccttggaccacacagctgacaggctacaggcaatcctgggtgttccttggaaggacaagaactgcacctcccggctggatgcgcacaaggtcctgtctgccctgcaggctgtacagggcctgctagtggcccagggcagggctgatagccaggcccagctgctgctgtccacggtggtgggcgtgttcacagccccaggcctgcacctgaagcagccgtttgtgcagggcctggctctctatacccctgtggtcctcccacgctctctggacttcacagaactggatgttgctgctgagaagattgacaggttcatgcaggctgtgacaggatggaagactggctgctccctgatgggagccagtgtggacagcaccctggctttcaacacctacgtccacttccaagggaagatgaagggcttctccctgctggccgagccccaggagttctgggtggacaacagcacctcagtgtctgttcccatgctctctggcatgggcaccttccagcactggagtgacatccaggacaacttctcggtgactcaagtgcccttcactgagagcgcctgcctgctgctgatccagcctcactatgcctctgacctggacaaggtggagggtctcactttccagcaaaactccctcaactggatgaagaaactatctccccggtgctgaacagcattttttttgagcttgaagcggatgagagagagcccacagagtctacccaacagcttaacaagcctgaggtcttggaggtgaccctgaaccgcccattcctgtttgctgtgtatgatcaaagcgccactgccctgcacttcctgggccgcgtggccaacccgctgagcacagcatgaggccagggccccagaacacagtgcctggcaaggcctctgcccctggcctttgaggcaaaggccagcagcagataacaaccccggacaaatcagcgatgtgtcacccccagtctcccaccttttcttctaatgagtcgactttgagctggaaagcagccgtttctccttggtctaagtgtgctgcatggagtgagcagtagaagcctgcagcggcacaaatgcacctcccagtttgctgggtttattttagagaatgggggtggggaggcaagaaccagtgtttagcgcgggactactgttccaaaaagaattccaaccgaccagcttgtttgtgaaacaaaaaagtgttccc

SEQ ID NO: 7 - DNA, 16001 bp, Macaca mulatta
  source 1..16001: mol_type = genomic DNA
gaagacagtgtggcaattcttcaaggatctagaactagaaataccatttgacccagccatcccattactgggtatatacccaaaggattataaatcatgctgctataaagacacatgcacacatatgtttattgcggcactattcacaacagcgaagacttggaaccaacccaaatgtccaacaaggatagactggattaagaaaatgtggcacatatacaccatggaatactatgtagccataaaaaaggatgagttcacgtcctttgtagggacatggatgaagctggaaaccataattctcagcaaactaatacaagaacagaaaactaaacaccgcatgttctcactcataggtgggaattaacaatgagaacacttggacacaggaaggggaacatcacacaccagggcctgtcgtggggtggggagaggggggagggatagcattaggagatatacctaatgtaaatgacgagttattgggtgcagcacaccaacatggcacatgtatatacatgcaacaaacctgcaagtttgtgcacatgtgccctagaacttaaagtgtactaaatttaaaaaaaaaaaaaaaaaagaaatttacttgtttaaaaaaaaatccaaatcctggcattgtccagaaaaatataacaagtttatttataattatcataaagttgaattgctgaaacttgttcactgaaacattttgatttgcattaatgccttatgtttccacatttatattaaaaattcacacacaaataaaaatggaaaaactgccaaaaaaaaatcaaggagacattttatttacatttactggttaattataaggaatacaaaagaacagccagaagaagagacacaaagcgtgaggtccacaagggtcctttttaagagacagagtctctgtcattcaggctggagtgcagcggtgtgagcatagctcactacagcctcaaacttctgggctcaagtgatcctcctgccccagcctcccaagcagctaggactaccagtgcatatcaccatatccagttagttttattttttgcacagatgggggtcttgctatgttgcctaggctggtctcaaactcttggcctcaaactatcttcctgcctcagttttccagagtacttgggttataaatgtgggccactgcacctggcccccaatcttgatggggagcaggtttctgcatgtgtgtcaaccccagctccttgagagtgcggcctgaagtccttggtcccggaggctcagcaggaaataggacagtgactgcataagcttgtgagaacctgtggccaggcagcagcagccgtttggccagggcttgtctcctgcagccctcctgcccagtacccgggcctgcttgtattcccctacacgcgccccccatgctctccctcttgttggtgagtgtcactcaagcctctgcctcagaaaagcccttctgcagcttccaagtcagaccagctcctcctccaggtgcaggcccagtgatatctgtccctcgcccctcgccagcttgcacaggtgaatgctttctgcatcctgaaggcatttcgtttgtgtcttttaatctggctgtgctactgttggtgtttaacagtctccccagctacactggaagcgaccagaaggcacttttcacttgctcgtgtgtttttcccagtgtctattagaggcctttgcacagggtaggcgccaaatggctgttgggagcagctgaaggtcacacatcccatgagcgggcagcagggtcagaagtggcccccgtgttgcctgagcgagacgctcccctgccctctgccctccgcgcctccggcctgcatgtccccgtggcctcttaggggcacatcccggggctgggtcaggaggtctgggcggttggccttaagctgtcacacacccagggagatgctgctgtttctgggaaccttggcccccactcctgcaaacttcggtaaatgtgtaactcgaccctgcaccggctcactctgttcagcagtgaaactgtgcatcgatcactaagacttcctggaaggggtcccagcgtgagtgtcccttctggcgtctgtctttctggccagcctgtggtctggccacatgatgtaacccccctccagcctgtgcacaggcagcctgggaacggctccatccccacccctcagatataaatagggcctcatgacgcggccaggggaagaagctgccattgttctgggtactacagcagaaggtaagccgggggccccctcagctccttctcagccttgtccctctcagacgtaactgagctgtgggccggaaggaaaaggccgggaggggcactggtgatggctgaagcatctctcccctcccataagaccagtcatctggacgcaggctttctccgctcagtgcccacccaggggtctcccaggaggagctgctcctccttagcaataggaccagatggtcaggtcttcctgcttcggctgagaagagttagggtcctcagggatggagcagactggcacaggagcagagtcatcatggtcaagagtccaccaggtcctcttgccatgaggaggaacagcagggcttgtacaggaagtggggccacagggaagggctgggcccggtcagtccccagctgggatccccagagtggtcaccctacccctccctcgagacagattccctgactgtgtcatcaggctggtcaccatctctctgaacctcgatttgctcacctataaaatgggactagtaacgatgcctgggctccctctctcaggggctgtggtgcagctgaagagaactaatacaacatgaaagtactttctaagctttgggataagctaaaaggcagattccaatttcattcaagggcagcgtagattggtgcttaaacttgtggatgacagagtcagagggcctggttctgagtcctagttctgtctcttcccagctgtgtgactttgcacaagtcactggacctctttgttcctctggaaaacagcaggaaccaattcattaactacttctccaggatgcattaggtcccggggactgtcctgggaatgtgggctgtattaggaaacatagcagtgggaaccctgctccggggctcacattcacgtcagggcaaacagacaaagacgctggacagcacaagtgcgtaactacatggtacaggggttataaggagggaaaaggggagccggatgagagagttgagagtgcccggtgtggtggggaaagctgcagggtgaaatacggcaccaaggaaacctcagggaaggtgaggactatgatgaggtcagaggggttgatataagaacgatgccctgcaaatcacaggcaccacgggagcgtgagccgtcatcttcacctgtagcattcagcctgggggaagtagggagacatagaaggggcaggtgctggcaaagaggcaggggcaggaggggagaaggcggaggggcgctccaggcaagggtgtcaggcccgccaccccagagcaccattactcccaggacgcggctgggtgcagacctggaaacagcctagggagcagctgcagatcacaactgagaacaaacgacagtctctgccttaaaaatggcccaaggaattgcgtctctggagatggtacctgcgcaggagcagcacagtgagtgggctgcaccgaccagcgccatccaaaccccgaacaggtggcgcttgtcaggcaggacttcccagcagtcggttcccacaggtttcccctgacgacctgatgtgatgtgactgtctagattaggtgagaactggtggctcaggcttctctgcacagacaggcctgcaagcagcagggagagttttctgttctgtttttccatgtcgtgtggctcttcctgagaacagcggatggagtcaacgcatggggagtggggtgaggcggtagctgaggtcagaagtcaaagtctctttggcatttgaatgactgaagcagaacgaaacacaccaggtacttcagcagttgcaccgtgttgagggcaggtgctggttaccggtctggggggaagccagctgctaatgtaagaagaatgactgggtgtgcttaggtgaagcagaaaaatctaggcatcaaggtggcctcgagtcagtgatgacctgctacagctccaaggaagcctggcgtagccctggggggacagaaaaggctaagcagtgacgatattgcagtacaccccctccacaagaaatgagtgagatgtggtacaaactgttagaattgaatgaatcaatagaatcaacgttcatcccgtcaatcaggaagagtcagatgaaatgaattagcagggccagcccaagaaccttgtcttctggggtctcggggtagtcttcatttgcagcagctgaggctgaagcccagtggcaaggcctttgagagaacatggtgccggacccgtgtctaaggcaggggttctaaaccctgcttacatatcagagccacctgagaaatttttttttttttaatttttatttttttaatctaaggaatccaagtatcagtgggcaaaccatgctaggtgtgcatgcctttggggctctgcaggggatagcactatggagggatggttgagagctggttttggggttgagacacgtggaaaatacttgggctttgggttgagcctgtggtgctcatcctggctgcatattaggaccacaaggagatgagaaaaccattcccaaccctcaccctagggcccttgaatgagcatctcaggggtctaggagtcctccgcaaagacctactgattggcacgtatgtgtttttctaggagagaacttacagccgcaggcaggagcatgtcttagtgtgcttgggctgccataagtaccacagactgggaggcttcaacaacagaaatgtattatctcacagttctggaagctagaagcccgggagcaagccatcggcagagttggtttcctctggggcctctatccttgccttgtagatggctgtcttctctctctgtcctcacatggtcttccctctgtgtgtgtccatgtcctcatctccccttctcataaggacacaggtcatattagatcagggctcactctcatggcctcattttaacttaatcatctctttaaagattctgtctccaaataatggtcacattctgaggtcctggggttgaggacttcaacatatgcattgtggccattgggggagttaggacatgattcagcctatattggtgcattttgcacttggatcatgtagatattttccatggagcttagaatccatttcttttctttttttgtagacatgaatggacttattctgggctaaatggtgacagagaatattgagacaatgaaaaatctggttagatggcacttaacgatcagttaatagtaatcacctttcaccctttgcaaaatgatatttcagggtatgcagaagcgagcaccccagtccgagatggctcctgccagcgtgagcctgagggccaccatcctctgcctcctggcctgggctggcctggccacaggtgaccgggtgtacatacaccccttccacctcgtcatccacaatgagagtacctgtgagcagctggcaaaggccgatgctgggaagcccaaagatcccaccttcacacctgttccgatacaggccaagacgtcccctgtggatgaaaaggccctgcaggaccagctagtgctggtcgctgcaaaactcgacaccgaggacaagttgagagccgcgatggttgggatgctggccaacttcttgggcttccgtatatatggcatgcacagtgagctatggggcgtggtccatggggccaccatcctctccccaacggctgtctttggcaccctggcctctctctacctgggagcgttggaccacacagccgacaggctacaggcaatcctgggcgtcccttggaaggacaagaactgcacctcccggctggatgcgcacaaggtcctctctgccctgcaggctgtacagggcctgctggtggcccagggcagggctgacggccagtcccagctgctgttgtccacagtggtgggtctcttcacagccccagatctgcacctgaagcagccgtttgtgcagggcctggctctctatgcccctgtggtcctcccacgctctctggacttcacagacctggaagtcgctgctgagaagattgacaggttcatgcaggctgtgacaggatggaagattagcagccccctgacgggagccagtgcggacagcaccctggttttcaacacctacgtccatttccaaggtagggcaaacccctctgccggctctgccctaggacttagtttccaatgcatagctgagctcagcaggtcaggccttggagatgggcaggggcagccctgcggacatacctggtggccaccctcgaggagtggggaagtggctgctctgctgggtccctggatggatgtccacctcccggacctgctgccctactatgcacgactacactacatcctttttcttacatcatttaatccccttatgatgtgatgcagaggtatttgtgcctttgtttactggtaaagaaatagagactcggagaaacaaagtgccttgctcaagatggcactgccaccagtgggggtcctgggatttcagcccacatctcctggccccacagcccagttctacgctcagagggtacgggttcttgtctctggagatggtcaggagctggggtccctggcctatgcagaaataagcaattggcttgcttaaatccctttcatgttaggaggggcattactgaaaacccgtactacaaagatcgttgggtttttttttttttttttttttttaattgagacagggtctcgctctgtcccccaggctgaagtgcagtggtgcaatcattgttcactgtatccttgaactcctggctgcaagcgatcctcccacctcagccttccaaagtgttgggattacaggcatgagccactgcacccagccaaagattgcttaaagcattcttttaacaaatactcattgaggatttgctacttgtaagactttaagcctggcatctcagaggaggccagaggagggttgtagaggccctgactccaggcttttaaaggtcaatgggcaaacgcctaggatatggagctgcagggaaacgtgctgtacaaggtactcagggagggctcggagccctcagaggacagaggtcactggggagtggagagcaggcctcacctggcagtgaggggaacggggctggtgaagccaggagcaagcatgatgggcccagcctgcagagtttggggcaaggaatgaggatggggtgtttggcttggcatgagtgttgaaccagaaaatgggcctggggagggcagagctggagacactttgaatgccatgccaggtaggtgtgggaacggggacgcattcgttcagaggtcgtcccggaagcccgccgtgtgtggactggaggcagggagggttgtttgaaggttacgcaagagtccaggcacacagtcacgggaacacgcgctcagggagcagctcggcgaatccatgggtggggtggggctgaggggtgtgtctgagagacattgatgaggctccgtcaagatgtgtaacctcgtgagggacagagagccaggcgggcggtgaaagacaggacggtggagaaagaggttcagtggcgcgtggtgattttctcaccatggcaacattcttgaggtctctccccgcgggttcaggggaggtgatagacgggggattgctcagccctggcactgactggtcacaggggcagaggccagcctgagggttgcccggctgagggtggcagcacgctgtgcagggcagagcggggacacgtgggctcagcctgctgaacctaggaggagtgctgggaggagcgctcactgagaaggagggtcctgcagaaggcaaaggcaagaaagccagtggcatctgaaatgggtctcccttcgaaagacagcccatccacctcacccagacctcagagccaggccatgaggaagaggagaaagaagaaaaaaaccagtgacatcaggactcaaaggaagcccggcatcctccctggcctccaccacatgctgccctgaccctgccccacttcctaacctttgctggtctcagtttccatgaaaggagacagccccttcctgcccacatggcctgtccagtgaggagatcgggggctgtctcgggacctctagattcccctttagcaatgatgttctatgtacatgacctcagcaggcagctagatgtgtcccactagagaggacctgaggatctggggcccgatgggctccagggcaccctttgcccagcacctgctgtgctgctgagcatgggactctggccccggcagttaccacaatgccagctgacttgagctcgagagatttacctagccttcggatgagaatggtgagctatgtgtgtgtcagacgaacagagggaagagggcagccactctcatgtcaaattccaacatcttttgggaagcagcttcctttttttggtttagtttgttggaagaaaagaattgtccctttcctccctctaaactaaaagccttgctagcctgggtgggcggcaccgaggtccctgtagggaatgtgcaaggaggatcctgcagtttcccgctcacatgccctcccgagactgagtgctccgaggactgaggacgaggaatatgccaggtctgccactgccttctcacaagacccagacccaggggaggcacagccatgcccagctcccacctgccagttctgtcctcccagcttccctacttccctgctggaagctccaattgagtacaaagggagaccccactgtttctgaaccatctctactcagactcccaagcgtcacgtgcccagaggactgctctgtgacaaactcatatacaatttcaccctcttctcctaaaaactaccacaaaatgggcctttcaaggtgagtgggaggacagccgagggcatcctgtgatgcactagtgtaaggtcgaggcagagggcgagctgccgtcatggagagaccccgggtaactgcttcacacacaagtttgtgtccttctcccacgccgggctctcccgagttctctgtcttctccacggccctgtgagcggggcagggggtggggagaacagagggctcacccctgcccccagggcccagtgtgcaaatccattcgtcacagcgaggtcttgtgagtctcctcagtagcaagggctgctgaagaatggagccctcgttcccggagcctgcgtggccagctctgtattccgtgactgtgatgggggagggtgggggccacaggacagccggcaggctctgccactgctgcggctggacatggattaaaaagtgagcatgagcaggggcctctaggagcagtgggatactgcagtggtggctgcgcgtcattctacatgcatgcaaacccacagaatgtaaaacaccaggacggagccccaaagaaaaccatcaactttgggtgctgaggatgtgtcaatgcaggttcatcaactgcaataaatgggccactctggtgtgagatgttgatcacggggaaggctgtgtgtggggggacaggagttatatgggaactttttgtactttctgctcgattttgctgtgaacgtagtcactctaaaaaagagtatctcttaaaatttttaaaaagtgagtgtgtcaaatcacagcctctgtgtcaggacagatgtaggtttgagttgacctggcaggtaccagtggcatatgtcccttaaaatgacagacgcaaacctccggttcagtgcctagcatgttacatgtcttcagcaggtggcagttagggctgcctcagtgaactcaaatggctgcattttgcaggaagatatgagctacatttggggtcctgtggccaggagaatacagagtggcctggggcggaccagggaaggaggctgtggcagggagaggggcaggatctgggccttcggtgtctgccagccctcgtccctgcccctgtcccggctgactcttccctccccgtctcctgtctggatttcagggaagatgagggacttcttcctgctggctgagccccaggagttctgggtggacaacagcacctcagtgtctgtccccatgctgtctggcgtgggcaccttccagcactggagcgacgcccaggacaacttctcagtgactcaagtgccctttactgagagcgcctgcttgctgctgattcagcctcactacgcctctgacctggacaaggtggagggtctcactttccagcaaaactccctcaactggatgaagaaactgtctccccggtaggagcctcctggtctcccctggaatgtgggagccgagctgtccttctgcccccactgggggtggggtggggagtagacacacatgaactgagccttgggtgcagagcagggcagggccgcagtggcatggggctgggcaggcggcctgtgtgtctatccaccagctctccatccacccagcacccagctctccagttagtgtctgtctttcaggtgcaggcaaggtaaagcaggggaggaagaatgctttttctatgcttatatttgcttggtggttttggagggaaagaatacattgcaatccgccctctgagagaggaacattttggccccacacctgacacacagcacatctgtggcatccaagagcttcttggaactgacttgccaggagggtttggactccatgtgagcgggggtggagccttctcagggagcatgccttgactccagaacgtccttgctggcggctggcggctgggcggggacaggtgtcgttagcacctctttcctgctgcaattcccttccatagagccttggattcaacctacacatccccccagatcatcaaggcctggaaatctgatcccagaggcaggcatggagtgacacgatggcttcttgacatcagctctggatgctttttatgttttaaaaattatggtgataaaatatacataacaaaatttgccatcgtaaccattttcgagtgcacagttcagtagcactaggcacattcacactgttgtgcagccatcaccgccatccatctccatttaccttctcatcttcccagaccgaagctctgccctgctgaaacactaactctccattttcccttcccctgggttcctggcaagcaccacgatgtcctcgaggtttacccatgttgtagcacgtgtcagaatttccttccttttgaaggctgaataatattcccttgcatgtggttaccaccttttgtctatccactcgtccatcaatggacacgtgggttgctttcacctttgagctgctgtgactagtgcagtgtacattgtaaacatggatgtactgtcagctcttataagtgcttgatatatcactggaaatgtccatgcgctctgaaggatgccagaagatggaagaggcccttacaaagatcaattgagttgacatagcaacgtgtccagcacgagttgacactgtaccctcctgtctccctccttttcatgggtgtcttgtcatcaagaacactgctgttgcagtagtaagacacagtgcattatttagagaatagcattttaaaattacccaagtaacacaccttcagtgcagccaatctaaaaacagaatgcaccaaaggacaaccattcctaggtcctcatcggtaaatgttctatgtccctgtcatagtatttcaaatgacatgaacgttttttattgtaggttttgctgaaattttccccaagggggaggatgacctagttgggtgggagggggacaaacatccctgtcgtcaggattgggtacaaggagcatatgcccacctggcctctgggagagccctctctgtgtggcctggagccttcctaactgtgcctcatctccccagggccatccacctgaccatgccccgactggtgctgcgaggatcttatgacctgcaggacctgcttgcccaggctgagctgcccgccattctgggcaccgagctgaacctgcaaaaattgagcaatgacgacctcagggtggggaaggtatgcgcgagcctgtgtctgtgcctgacctgggttccgagtgttcacagggtggggggcatggatggaagggacacagaggaggctgtgggtggggccagcagggcaagagggagaggagagtagggccaaaggtgggagagaagtggccagagcattgtgaggctttccaggtgcacagcagcaaatccctcccctgctccgcctcctcctgctgggggtgtgttccatggtctcgcctgctccgcctcctcctgctgggggtgtgtttcatggtcctgctccgcctcctcctgctgggggtgtgttccatgtcctgctccgcctcctcctgctgggggtgtgttccatggttctgctccgcctccacctgctgggagtgtgttccatggtcctgctccgcctcctcctgctgggggggtgttccatggacctgctccgcctcctcctgctgggggtgtgttccatggacctgctccgcctcatcctgctgggggtgtgttccatgtcctgctccgcctcctcctgctagaagtgtgttccatggtcctgctcggccttgccttgcctcagggtcctccagggatcctgcagtggagttgaaaccgggatgaagagagtgagcacccttggacctggtgccctgggtccagccccttctttagggaaatgctgagcgcagacagaatgtcccctgccatgcggcaccatgcacatctgtggctaccaaggatgcgcctggatgctctgggccctgtgctcggtgctggggagaaagtggaagttcctacgggggccagcgggatgagctctctgtgctaagttagctaagccctggcactggtgggccatggccaagggagccaggaattctgcccggaacagccgggcggaacgtgaagatgggaggacgtgaggggcgtggtagggaggagccggtacgtgagtttggccactgtggccaagtaagggtcatctacacagacacacccttgcctacactgaggagcaggcatacactgtgcatcctcctggcagactggacaatgtctccctccaggacagtgcacatcacagaggtcctgagccctccccggccctctagccctcagcaccctgggtcacccagtgcgccctcagaatgaccctgatgtctgccgctttgcaggtgctgaacagcattttttttgaactcgaagcggatgagagagagcccacagagtctacccgacagctgaacaggcctgagttcttggaggtgaccctggaccgcccattcctgtttgctgtgtatgatcaaagtgccactgccctgcacttcctgggccgtgtggccaacccgctgagcccagcatgaggccagggccccagaacacagcgcctggcaaggcctctgcccctggcctttgaggcgaaggccagcggcagatagtaactctggacaaaccagcgatttgtcacccccagtctcccaccttttcttctaatgagtcaacttcgagctggaaagcagtcgtttctccttggtctacgtggtgctgcgtggagtgagcagtaagaaacctgtggcagcacaaatgcgcctcccaggttgctgggtttattttagagaatgggggtggggaggcaagaaccagtgtttagcgcgggaccaccgttccaaaaagaattccaaccgaccagcttgtttgtgaaacaaaaaagtgttcccttttcaagttgagaacaaaaattgggttttaaaattaaagtatacatttttgcattgccttcggtttgtatttagtgtcttgaatgtaagaacatgacctccgtgtagtgtctacagtagcttagttttttccacagatgcttgtgatttttttgaataacacgtgaaagatgcaagcatctgaatttctgtttgaatgtggaaaccatagctggttatttctcctttgtgttagtaataaacgtcttgcaacaataagcctcccaaaattctatctttcatttagcagccaaacagatgtatacaatttagcagatagactgtgcaaaccaaagtgctttcctggactttggatggaatttccattggaagcctgagccagtacttagcagtcctttgaagttttaggtgatgcttttctctggacacttccattggtaagcagtggtggccatctgtgtgacggacagggggtgggaagagggtgacagggaaggccccataccccacatggcacctgggaaaggaaccaggcggacaggacttcttccatcctggtgacacagggccagactgctgctggtattgtgctccgggagtggaaggtagagaaataaatcttcacaaataaatatttgccatttttccccatctgttgagtgcctccacctgctcctcctcgatgggattaggcccacagtttggaatcttggggagagccaaggaggcggtaggcacccagcaggcccatggccatcagctgatagcaatggtgatcctgtcctacctatgtgtgtaaggcactcaatcttcctcccttccatacatattgcaataaataagcaagccgtacaatgtgttagctattgatcagaacgaaagtgaaatctgccacggggattacaaatcttggcttctcccctcacatttctgagagtcttcccctgattttgaacacatctccctagctcgatgtcaagatgaggggattctgtcggtgacagcagtgcccttagttgcttcgttgtaactccccgtcaccagttttattcagttaccctccagtcccactctcagcgcttcctggcttgttctgccctcaaagtgcgtagaactggcacacatggactctccgaaacagctgaaggacgccaagtttctcaggagtactggaagtacagagagcagaagtgccttaaggtctcactattcaaagtgtggcgcttggacctgcagtggcagcagctgccctgggagcttgttagaaggcagcttctcacgcccctcctggacctacagagtcagaatctgcaattttacgggaggtccaggcttggaagttgcttgtaatgacctgagacagcgcagccaagtgctggaaaaatagagcatttaagtttgtgactttattttaaaaggcagctggcagtcgacgaaccaaatttcttctacttagtggcggcttcggcttctggaagtcgctaggagtatgaagttgccaaacagcactgttctcctgctgttctctgtgcacttgtaaatgggaagctgggtcaggatagatctctcagctattagaaagatacaaaatactaacattttgcaggttacttaacacacacacacacaaaattcattccacaggtcagtttctctgaaacattttttcactaaattctaagtgttcctggagttgcaagtgcctgtctcctagactaggcaattactcagcaactacaatcactgtcaatccgagatttcagctgcgcatgagaccatggtcaggggatgctttgaacagtctctgaggaaatgagtttgaaaaatggaaagattttttttacgcacttggcagtaaaacctgatggggacagacatcaggctgtttaagatcctcagaagaaaaaattgatagtgtgaatattcctcaatttgctgcacaaagatgtacgtgtgattataaggtgttattccggaagcccctgggggggttatgggatatacactatatgggccactttaccttcctaaaatctgaaaaattccaacgactgaaacatggactgaaggttttgaatcgtgtatggtgaatgtgaataccattccatgtgatttttttttctagcagactttagttttttagagcagttttaagcccacaccaaaacggaga

SEQ ID NO: 8 - DNA, 19 bp, synthetic construct
  source 1..19: mol_type = other DNA
ccctgatgggagccagtgt

SEQ ID NO: 9 - DNA, 19 bp, synthetic construct
  source 1..19: mol_type = other DNA
agcagggagaagcccttca

SEQ ID NO: 10 - DNA, 27 bp, synthetic construct
  source 1..27: mol_type = other DNA
ccctggctttcaacacctacgtccact

SEQ ID NO: 11 - DNA, 20 bp, synthetic construct
  source 1..20: mol_type = other DNA
ggacaaggtggagggtctca

SEQ ID NO: 12 - DNA, 21 bp, synthetic construct
  source 1..21: mol_type = other DNA
agatccttgcagcaccagttg

SEQ ID NO: 13 - DNA, 29 bp, synthetic construct
  source 1..29: mol_type = other DNA
atgaagaaactatctccccggaccatcca

SEQ ID NO: 14 - DNA, 16 bp, synthetic construct
  source 1..16: mol_type = other DNA
tgcccgctcatgggat

SEQ ID NO: 15 - DNA, 16 bp, synthetic construct
  source 1..16: mol_type = other DNA
gggccacttctgaccc

SEQ ID NO: 16 - DNA, 16 bp, synthetic construct
  source 1..16: mol_type = other DNA
gcttaggcaacacggg

SEQ ID NO: 17 - DNA, 16 bp, synthetic construct
  source 1..16: mol_type = other DNA
ggagagtcttgcttag

SEQ ID NO: 18 - DNA, 16 bp, synthetic construct
  source 1..16: mol_type = other DNA
catgcaggccggaggt

SEQ ID NO: 19 - DNA, 16 bp, synthetic construct
  source 1..16: mol_type = other DNA
gccacagggacatgca

SEQ ID NO: 20 - DNA, 16 bp, synthetic construct
  source 1..16: mol_type = other DNA
tgacccagccccggga

SEQ ID NO: 21 - DNA, 16 bp, synthetic construct
  source 1..16: mol_type = other DNA
tgtgacagcctgaggc

SEQ ID NO: 22 - DNA, 16 bp, synthetic construct
  source 1..16: mol_type = other DNA
tccctaggtgtgtgac

SEQ ID NO: 23 - DNA, 16 bp, synthetic construct
  source 1..16: mol_type = other DNA
gaaacgggagcatctc

SEQ ID NO: 24 - DNA, 16 bp, synthetic construct
  source 1..16: mol_type = other DNA
aaggttcccagaaacg

SEQ ID NO: 25 - DNA, 16 bp, synthetic construct
  source 1..16: mol_type = other DNA
agtttgcaggagtcgg

SEQ ID NO: 26 - DNA, 16 bp, synthetic construct
  source 1..16: mol_type = other DNA
tcgagttacacattta

SEQ ID NO: 27 - DNA, 16 bp, synthetic construct
  source 1..16: mol_type = other DNA
agagtgagccggtgca

SEQ ID NO: 28 - DNA, 16 bp, synthetic construct
  source 1..16: mol_type = other DNA
actgctgaacagagtg

SEQ ID NO: 29 - DNA, 16 bp, synthetic construct
  source 1..16: mol_type = other DNA
gcagagtttcactgct

SEQ ID NO: 30 - DNA, 16 bp, synthetic construct
  source 1..16: mol_type = other DNA
agtgatcgatgcagag

SEQ ID NO: 31 - DNA, 16 bp, synthetic construct
  source 1..16: mol_type = other DNA
aggaagtcttagtgat

SEQ ID NO: 32 - DNA, 16 bp, synthetic construct
  source 1..16: mol_type = other DNA
tgggacctcttccagg

SEQ ID NO: 33 - DNA, 16 bp, synthetic construct
  source 1..16: mol_type = other DNA
ggccagaccacaggct

SEQ ID NO: 34 - DNA, 16 bp, synthetic construct
  source 1..16: mol_type = other DNA
tacatcacttggccag

SEQ ID NO: 35 - DNA, 16 bp, synthetic construct
  source 1..16: mol_type = other DNA
agaggagggttacatc

SEQ ID NO: 36 - DNA, 16 bp, synthetic construct
  source 1..16: mol_type = other DNA
gtgcacaggctggaga

SEQ ID NO: 37 - DNA, 16 bp, synthetic construct
  source 1..16: mol_type = other DNA
tatttatagctgaggg

SEQ ID NO: 38 - DNA, 16 bp, synthetic construct
  source 1..16: mol_type = other DNA
cacgatgccctattta

SEQ ID NO: 39 - DNA, 16 bp, synthetic construct
  source 1..16: mol_type = other DNA
tacccagaacaacggc

SEQ ID NO: 40 - DNA, 16 bp, synthetic construct
  source 1..16: mol_type = other DNA
gccatctcagactggg

SEQ ID NO: 41 - DNA, 16 bp, synthetic construct
  source 1..16: mol_type = other DNA
accggcaggagccatc

SEQ ID NO: 42 - DNA, 16 bp, synthetic construct
  source 1..16: mol_type = other DNA
tcaggctcacaccggc

SEQ ID NO: 43 - DNA, 16 bp, synthetic construct
  source 1..16: mol_type = other DNA
atggtggccctcaggc

SEQ ID NO: 44 - DNA, 16 bp, synthetic construct
  source 1..16: mol_type = other DNA
ggtcacctgcagccag

SEQ ID NO: 45 - DNA, 16 bp, synthetic construct
  source 1..16: mol_type = other DNA
atgtacacccggtcac

SEQ ID NO: 46 - DNA, 16 bp, synthetic construct
  source 1..16: mol_type = other DNA
ggtactctcattgtgg

SEQ ID NO: 47 - DNA, 16 bp, synthetic construct
  source 1..16: mol_type = other DNA
agctgctcacaggtac

SEQ ID NO: 48 - DNA, 16 bp, synthetic construct
  source 1..16: mol_type = other DNA
cttcccggcattggcc

SEQ ID NO: 49 - DNA, 16 bp, synthetic construct
  source 1..16: mol_type = other DNA
agcaggtatgaaggtg

SEQ ID NO: 50 - DNA, 16 bp, synthetic construct
  source 1..16: mol_type = other DNA
cctgaattggagcagg

SEQ ID NO: 51 - DNA, 16 bp, synthetic construct
  source 1..16: mol_type = other DNA
gatgtcttggcctgaa

SEQ ID NO: 52 - DNA, 16 bp, synthetic construct
  source 1..16: mol_type = other DNA
cttttcatccacaggg

SEQ ID NO: 53 - DNA, 16 bp, synthetic construct
  source 1..16: mol_type = other DNA
agcaccagctggtcct

SEQ ID NO: 54 - DNA, 16 bp, synthetic construct
  source 1..16: mol_type = other DNA
tgcagcgactagcacc

SEQ ID NO: 55 - DNA, 16 bp, synthetic construct
  source 1..16: mol_type = other DNA
tgtcaagttttgcagc

SEQ ID NO: 56 - DNA, 16 bp, synthetic construct
  source 1..16: mol_type = other DNA
cggccctcaacttgtc

SEQ ID NO: 57 - DNA, 16 bp, synthetic construct
  source 1..16: mol_type = other DNA
tcccgaccattgcggc

SEQ ID NO: 58 - DNA, 16 bp, synthetic construct
  source 1..16: mol_type = other DNA
ttggccagcatcccga

SEQ ID NO: 59 - DNA, 16 bp, synthetic construct
  source 1..16: mol_type = other DNA
gcccaagaagttggcc

SEQ ID NO: 60 - DNA, 16 bp, synthetic construct
  source 1..16: mol_type = other DNA
atatacggaagcccaa

SEQ ID NO: 61 - DNA, 16 bp, synthetic construct
  source 1..16: mol_type = other DNA
tgcatgccatatatac

SEQ ID NO: 62 - DNA, 16 bp, synthetic construct
  source 1..16: mol_type = other DNA
gccccatagctcactg

SEQ ID NO: 63 - DNA, 16 bp, synthetic construct
  source 1..16: mol_type = other DNA
ggccccatggaccacg

SEQ ID NO: 64 - DNA, 16 bp, synthetic construct
  source 1..16: mol_type = other DNA
aaagacagccgttggg

SEQ ID NO: 65 - DNA, 16 bp, synthetic construct
  source 1..16: mol_type = other DNA
ccagggtgccaaagac

SEQ ID NO: 66 - DNA, 16 bp, synthetic construct
  source 1..16: mol_type = other DNA
cagatagagagaggcc

SEQ ID NO: 67 - DNA, 16 bp, synthetic construct
  source 1..16: mol_type = other DNA
gtgtggtccaaggctc

SEQ ID NO: 68 - DNA, 16 bp, synthetic construct
  source 1..16: mol_type = other DNA
cacccaggattgcctg

SEQ ID NO: 69 - DNA, 16 bp, synthetic construct
  source 1..16: mol_type = other DNA
ttccaaggaacaccca

SEQ ID NO: 70 - DNA, 16 bp, synthetic construct
  source 1..16: mol_type = other DNA
agccgggaggtgcagt

SEQ ID NO: 71 - DNA, 16 bp, synthetic construct
  source 1..16: mol_type = other DNA
tccagccgggaggtgc

SEQ ID NO: 72 - DNA, 16 bp, synthetic construct
  source 1..16: mol_type = other DNA
acagcctgcagggcag

SEQ ID NO: 73 - DNA, 16 bp, synthetic construct
  source 1..16: mol_type = other DNA
ccactagcaggccctg

SEQ ID NO: 74 - DNA, 16 bp, synthetic construct
  source 1..16: mol_type = other DNA
tatcagccctgccctg

SEQ ID NO: 75 - DNA, 16 bp, synthetic construct
  source 1..16: mol_type = other DNA
tgggcctggctatcag

SEQ ID NO: 76 - DNA, 16 bp, synthetic construct
  source 1..16: mol_type = other DNA
cgtggacagcagcagc

SEQ ID NO: 77 - DNA, 16 bp, synthetic construct
  source 1..16: mol_type = other DNA
gtgaacacgcccacca

SEQ ID NO: 78 - DNA, 16 bp, synthetic construct
  source 1..16: mol_type = other DNA
tcaggtgcaggcctgg

SEQ ID NO: 79 - DNA, 16 bp, synthetic construct
  source 1..16: mol_type = other DNA
gccctgcacaaacggc

SEQ ID NO: 80 - DNA, 16 bp, synthetic construct
  source 1..16: mol_type = other DNA
tagagagccaggccct

SEQ ID NO: 81 - DNA, 16 bp, synthetic construct
  source 1..16: mol_type = other DNA
cgtgggaggaccacag

SEQ ID NO: 82 - DNA, 16 bp, synthetic construct
  source 1..16: mol_type = other DNA
tgaagtccagagagcg

SEQ ID NO: 83 - DNA, 16 bp, synthetic construct
  source 1..16: mol_type = other DNA
gcaacatccagttctg

SEQ ID NO: 84 - DNA, 16 bp, synthetic construct
  source 1..16: mol_type = other DNA
tcttctcagcagcaac

SEQ ID NO: 85 - DNA, 16 bp, synthetic construct
  source 1..16: mol_type = other DNA
cctgtcacagcctgca

SEQ ID NO: 86 - DNA, 16 bp, synthetic construct
  source 1..16: mol_type = other DNA
ttccatcctgtcacag

SEQ ID NO: 87 - DNA, 16 bp, synthetic construct
  source 1..16: mol_type = other DNA
tgtccacccagaactc

SEQ ID NO: 88 - DNA, 16 bp, synthetic construct
  source 1..16: mol_type = other DNA
tgttgtccacccagaa

SEQ ID NO: 89 - DNA, 16 bp, synthetic construct
  source 1..16: mol_type = other DNA
tgctgttgtccaccca

SEQ ID NO: 90 - DNA, 16 bp, synthetic construct
  source 1..16: mol_type = other DNA
aggtgctgttgtccac

SEQ ID NO: 91 - DNA, 16 bp, synthetic construct
  source 1..16: mol_type = other DNA
ctgaggtgctgttgtc

SEQ ID NO: 92 - DNA, 16 bp, synthetic construct
  source 1..16: mol_type = other DNA
acactgaggtgctgtt

SEQ ID NO: 93 - DNA, 16 bp, synthetic construct
  source 1..16: mol_type = other DNA
cagacactgaggtgct

SEQ ID NO: 94 - DNA, 16 bp, synthetic construct
  source 1..16: mol_type = other DNA
agcatgggaacagaca

SEQ ID NO: 95 - DNA, 16 bp, synthetic construct
  source 1..16: mol_type = other DNA
cccatgccagagagca

SEQ ID NO: 96 - DNA, 16 bp, synthetic construct
  source 1..16: mol_type = other DNA
actccagtgctggaag

SEQ ID NO: 97 - DNA, 16 bp, synthetic construct
  source 1..16: mol_type = other DNA
gtcactccagtgctgg

SEQ ID NO: 98 - DNA, 16 bp, synthetic construct
  source 1..16: mol_type = other DNA
gtcctggatgtcactc

SEQ ID NO: 99 - DNA, 16 bp, synthetic construct
  source 1..16: mol_type = other DNA
ccgagaagttgtcctg

SEQ ID NO: 100 - DNA, 16 bp, synthetic construct
  source 1..16: mol_type = other DNA
acttgagtcaccgaga

SEQ ID NO: 101 - DNA, 16 bp, synthetic construct
  source 1..16: mol_type = other DNA
agtgaagggcacttga

SEQ ID NO: 102 - DNA, 16 bp, synthetic construct
  source 1..16: mol_type = other DNA
ctggatcagcagcagg

SEQ ID NO: 103 - DNA, 16 bp, synthetic construct
  source 1..16: mol_type = other DNA
ggtcagaggcatagtg

SEQ ID NO: 104 - DNA, 16 bp, synthetic construct
  source 1..16: mol_type = other DNA
tggaaagtgagaccct

SEQ ID NO: 105 - DNA, 16 bp, synthetic construct
  source 1..16: mol_type = other DNA
ggagttttgctggaaa

SEQ ID NO: 106 - DNA, 16 bp, synthetic construct
  source 1..16: mol_type = other DNA
tccagttgagggagtt

SEQ ID NO: 107 - DNA, 16 bp, synthetic construct
  source 1..16: mol_type = other DNA
ggagatagtttcttca

SEQ ID NO: 108 - DNA, 16 bp, synthetic construct
  source 1..16: mol_type = other DNA
tcaggtggatggtccg

SEQ ID NO: 109 - DNA, 16 bp, synthetic construct
  source 1..16: mol_type = other DNA
tgcagcaccagttggg

SEQ ID NO: 110 - DNA, 16 bp, synthetic construct
  source 1..16: mol_type = other DNA
ataagatccttgcagc

SEQ ID NO: 111 - DNA, 16 bp, synthetic construct
  source 1..16: mol_type = other DNA
agcaggtcctgcaggt

SEQ ID NO: 112 - DNA, 16 bp, synthetic construct
  source 1..16: mol_type = other DNA
cgggcagctcagcctg

SEQ ID NO: 113 - DNA, 16 bp, synthetic construct
  source 1..16: mol_type = other DNA
tgcagaatggcgggca

SEQ ID NO: 114 - DNA, 16 bp, synthetic construct
  source 1..16: mol_type = other DNA
cagctcggtgtgcaga

SEQ ID NO: 115 - DNA, 16 bp, synthetic construct
  source 1..16: mol_type = other DNA
tttgcaggttcagctc

SEQ ID NO: 116 - DNA, 16 bp, synthetic construct
  source 1..16: mol_type = other DNA
ggtcattgctcaattt

SEQ ID NO: 117 - DNA, 16 bp, synthetic construct
  source 1..16: mol_type = other DNA
accctgatgcggtcat

SEQ ID NO: 118 - DNA, 16 bp, synthetic construct
  source 1..16: mol_type = other DNA
gcttcaagctcaaaaa

SEQ ID NO: 119 - DNA, 16 bp, synthetic construct
  source 1..16: mol_type = other DNA
tgttgggtagactctg

SEQ ID NO: 120 - DNA, 16 bp, synthetic construct
  source 1..16: mol_type = other DNA
caggcttgttaagctg

SEQ ID NO: 121 - DNA, 16 bp, synthetic construct
  source 1..16: mol_type = other DNA
tccaagacctcaggct

SEQ ID NO: 122 - DNA, 16 bp, synthetic construct
  source 1..16: mol_type = other DNA
aggaatgggcggttca

SEQ ID NO: 123 - DNA, 16 bp, synthetic construct
  source 1..16: mol_type = other DNA
cggcccaggaagtgca

SEQ ID NO: 124 - DNA, 16 bp, synthetic construct
  source 1..16: mol_type = other DNA
gttggccacgcggccc

SEQ ID NO: 125 - DNA, 16 bp, synthetic construct
  source 1..16: mol_type = other DNA
tgctcagcgggttggc

SEQ ID NO: 126 - DNA, 16 bp, synthetic construct
  source 1..16: mol_type = other DNA
ggccctggcctcatgc

SEQ ID NO: 127 - DNA, 16 bp, synthetic construct
  source 1..16: mol_type = other DNA
ggccttgccaggcact

SEQ ID NO: 128 - DNA, 16 bp, synthetic construct
  source 1..16: mol_type = other DNA
gcctcaaaggccaggg

SEQ ID NO: 129 - DNA, 16 bp, synthetic construct
  source 1..16: mol_type = other DNA
cgctgatttgtccggg

SEQ ID NO: 130 - DNA, 16 bp, synthetic construct
  source 1..16: mol_type = other DNA
ggtgacacatcgctga

SEQ ID NO: 131 - DNA, 16 bp, synthetic construct
  source 1..16: mol_type = other DNA
gaaaaggtgggagact

SEQ ID NO: 132 - DNA, 16 bp, synthetic construct
  source 1..16: mol_type = other DNA
cgactcattagaagaa

SEQ ID NO: 133 - DNA, 16 bp, synthetic construct
  source 1..16: mol_type = other DNA
acggctgctttccagc

SEQ ID NO: 134 - DNA, 16 bp, synthetic construct
  source 1..16: mol_type = other DNA
ccaaggagaaacggct

SEQ ID NO: 135 - DNA, 16 bp, synthetic construct
  source 1..16: mol_type = other DNA
cacacttagaccaagg

SEQ ID NO: 136 - DNA, 16 bp, synthetic construct
  source 1..16: mol_type = other DNA
tgccgctgcaggcttc

SEQ ID NO: 137 - DNA, 16 bp, synthetic construct
  source 1..16: mol_type = other DNA
ggtgcatttgtgccgc

SEQ ID NO: 138 - DNA, 16 bp, synthetic construct
  source 1..16: mol_type = other DNA
tggtcggttggaattc

SEQ ID NO: 139 - DNA, 16 bp, synthetic construct
  source 1..16: mol_type = other DNA
acaaacaagctggtcg

SEQ ID NO: 140 - DNA, 16 bp, synthetic construct
  source 1..16: mol_type = other DNA
cttgaaaagggaacac

SEQ ID NO: 141 - DNA, 16 bp, synthetic construct
  source 1..16: mol_type = other DNA
aacccaatttttgttc

SEQ ID NO: 142 - DNA, 16 bp, synthetic construct
  source 1..16: mol_type = other DNA
ggcaatgcaaaaatgt

SEQ ID NO: 143 - DNA, 16 bp, synthetic construct
  source 1..16: mol_type = other DNA
tacattcaagacacta

SEQ ID NO: 144 - DNA, 16 bp, synthetic construct
  source 1..16: mol_type = other DNA
ggtcatgttcttacat

SEQ ID NO: 145 - DNA, 16 bp, synthetic construct
  source 1..16: mol_type = other DNA
actacacggaggtcat

SEQ ID NO: 146 - DNA, 16 bp, synthetic construct
  source 1..16: mol_type = other DNA
tattacagacactaca

SEQ ID NO: 147 - DNA, 16 bp, synthetic construct
  source 1..16: mol_type = other DNA
ggtgcttgcatctttc

SEQ ID NO: 148 - DNA, 16 bp, synthetic construct
  source 1..16: mol_type = other DNA
cagaaattcaggtgct

SEQ ID NO: 149 - DNA, 16 bp, synthetic construct
  source 1..16: mol_type = other DNA
ccgcattcaaacagaa

SEQ ID NO: 150 - DNA, 16 bp, synthetic construct
  source 1..16: mol_type = other DNA
agctatggttccgcat

SEQ ID NO: 151 - DNA, 16 bp, synthetic construct
  source 1..16: mol_type = other DNA
tactaacacaagggag

SEQ ID NO: 152 - DNA, 16 bp, synthetic construct
  source 1..16: mol_type = other DNA
ttattgtggcaagacg

SEQ ID NO: 153 - DNA, 16 bp, synthetic construct
  source 1..16: mol_type = other DNA
ttactaatacagccca

SEQ ID NO: 154 - DNA, 16 bp, synthetic construct
  source 1..16: mol_type = other DNA
ggtttccctgatgcag

SEQ ID NO: 155 - DNA, 16 bp, synthetic construct
  source 1..16: mol_type = other DNA
tgatagttggattcct

SEQ ID NO: 156 - DNA, 16 bp, synthetic construct
  source 1..16: mol_type = other DNA
tgtggtcccaacatgc

SEQ ID NO: 157 - DNA, 16 bp, synthetic construct
  source 1..16: mol_type = other DNA
ttgaagtcctcaaccc

SEQ ID NO: 158 - DNA, 16 bp, synthetic construct
  source 1..16: mol_type = other DNA
ctcttggatgtcacag

SEQ ID NO: 159 - DNA, 16 bp, synthetic construct
  source 1..16: mol_type = other DNA
gatggcaaattttgtt

SEQ ID NO: 160 - DNA, 16 bp, synthetic construct
  source 1..16: mol_type = other DNA
tgtgttacttgggtaa

SEQ ID NO: 161 - DNA, 16 bp, synthetic construct
  source 1..16: mol_type = other DNA
gccacacagtgagggc

SEQ ID NO: 162 - DNA, 16 bp, synthetic construct
  source 1..16: mol_type = other DNA
ctgctgctggcctttg

SEQ ID NO: 163 - DNA, 16 bp, synthetic construct
  source 1..16: mol_type = other DNA
gttatctgctgctggc

SEQ ID NO: 164 - DNA, 16 bp, synthetic construct
  source 1..16: mol_type = other DNA
gggttgttatctgctg

SEQ ID NO: 165 - DNA, 16 bp, synthetic construct
  source 1..16: mol_type = other DNA
tcgctgatttgtccgg

SEQ ID NO: 166 - DNA, 16 bp, synthetic construct
  source 1..16: mol_type = other DNA
catcgctgatttgtcc

SEQ ID NO: 167 - DNA, 16 bp, synthetic construct
  source 1..16: mol_type = other DNA
gacacatcgctgattt

SEQ ID NO: 168 - DNA, 16 bp, synthetic construct
  source 1..16: mol_type = other DNA
aaaggtgggagactgg

SEQ ID NO: 169 - DNA, 16 bp, synthetic construct
  source 1..16: mol_type = other DNA
attagaagaaaaggtg

SEQ ID NO: 170 - DNA, 16 bp, synthetic construct
  source 1..16: mol_type = other DNA
gtcgactcattagaag

SEQ ID NO: 171 - DNA, 16 bp, synthetic construct
  source 1..16: mol_type = other DNA
tcaaagtcgactcatt

SEQ ID NO: 172 - DNA, 16 bp, synthetic construct
  source 1..16: mol_type = other DNA
cagctcaaagtcgact

SEQ ID NO: 173 - DNA, 16 bp, synthetic construct
  source 1..16: mol_type = other DNA
gctgctggcctttgcc

SEQ ID NO: 174 - DNA, 16 bp, synthetic construct
  source 1..16: mol_type = other DNA
tgctgctggcctttgc

SEQ ID NO: 175 - DNA, 16 bp, synthetic construct
  source 1..16: mol_type = other DNA
tctgctgctggccttt

SEQ ID NO: 176 - DNA, 16 bp, synthetic construct
  source 1..16: mol_type = other DNA
atctgctgctggcctt

SEQ ID NO: 177 - DNA, 16 bp, synthetic construct
  source 1..16: mol_type = other DNA
tatctgctgctggcct

SEQ ID NO: 178 - DNA, 16 bp, synthetic construct
  source 1..16: mol_type = other DNA
ttatctgctgctggcc

SEQ ID NO: 179 - DNA, 16 bp, synthetic construct
  source 1..16: mol_type = other DNA
tgttatctgctgctgg

SEQ ID NO: 180 - DNA, 16 bp, synthetic construct
  source 1..16: mol_type = other DNA
ttgttatctgctgctg

SEQ ID NO: 181 - DNA, 16 bp, synthetic construct
  source 1..16: mol_type = other DNA
gttgttatctgctgct

SEQ ID NO: 182 - DNA, 16 bp, synthetic construct
  source 1..16: mol_type = other DNA
ggttgttatctgctgc

SEQ ID NO: 183 - DNA, 16 bp, synthetic construct
  source 1..16: mol_type = other DNA
atcgctgatttgtccg

SEQ ID NO: 184 - DNA, 16 bp, synthetic construct
  source 1..16: mol_type = other DNA
acatcgctgatttgtc

SEQ ID NO: 185 - DNA, 16 bp, synthetic construct
  source 1..16: mol_type = other DNA
cacatcgctgatttgt

SEQ ID NO: 186 - DNA, 16 bp, synthetic construct
  source 1..16: mol_type = other DNA
acacatcgctgatttg

SEQ ID NO: 187 - DNA, 16 bp, synthetic construct
  source 1..16: mol_type = other DNA
tgacacatcgctgatt

SEQ ID NO: 188 - DNA, 16 bp, synthetic construct
  source 1..16: mol_type = other DNA
gtgacacatcgctgat

SEQ ID NO: 189 - DNA, 16 bp, synthetic construct
  source 1..16: mol_type = other DNA
gggtgacacatcgctg

SEQ ID NO: 190 - DNA, 16 bp, synthetic construct
  source 1..16: mol_type = other DNA
aaaaggtgggagactg

SEQ ID NO: 191 - DNA, 16 bp, synthetic construct
  source 1..16: mol_type = other DNA
agaaaaggtgggagac

SEQ ID NO: 192 - DNA, 16 bp, synthetic construct
  source 1..16: mol_type = other DNA
tagaagaaaaggtggg

SEQ ID NO: 193 - DNA, 16 bp, synthetic construct
  source 1..16: mol_type = other DNA
ttagaagaaaaggtgg

SEQ ID NO: 194 - DNA, 16 bp, synthetic construct
  source 1..16: mol_type = other DNA
cattagaagaaaaggt

SEQ ID NO: 195 - DNA, 16 bp, synthetic construct
  source 1..16: mol_type = other DNA
tcattagaagaaaagg

SEQ ID NO: 196 - DNA, 16 bp, synthetic construct
  source 1..16: mol_type = other DNA
ctcattagaagaaaag

SEQ ID NO: 197 - DNA, 16 bp, synthetic construct
  source 1..16: mol_type = other DNA
actcattagaagaaaa

SEQ ID NO: 198 - DNA, 16 bp, synthetic construct
  source 1..16: mol_type = other DNA
gactcattagaagaaa

SEQ ID NO: 199 - DNA, 16 bp, synthetic construct
  source 1..16: mol_type = other DNA
tcgactcattagaaga

SEQ ID NO: 200 - DNA, 16 bp, synthetic construct
  source 1..16: mol_type = other DNA
agtcgactcattagaa

SEQ ID NO: 201 - DNA, 16 bp, synthetic construct
  source 1..16: mol_type = other DNA
aagtcgactcattaga

SEQ ID NO: 202 - DNA, 16 bp, synthetic construct
  source 1..16: mol_type = other DNA
aaagtcgactcattag

SEQ ID NO: 203 - DNA, 16 bp, synthetic construct
  source 1..16: mol_type = other DNA
caaagtcgactcatta

SEQ ID NO: 204 - DNA, 16 bp, synthetic construct
  source 1..16: mol_type = other DNA
ctcaaagtcgactcat

SEQ ID NO: 205 - DNA, 16 bp, synthetic construct
  source 1..16: mol_type = other DNA
gctcaaagtcgactca

SEQ ID NO: 206 - DNA, 16 bp, synthetic construct
  source 1..16: mol_type = other DNA
agctcaaagtcgactc

SEQ ID NO: 207 - DNA, 20 bp, synthetic construct
  source 1..20: mol_type = other DNA
aggccttgccaggcactgtg

SEQ ID NO: 208 - DNA, 20 bp, synthetic construct
  source 1..20: mol_type = other DNA
gaggccttgccaggcactgt

SEQ ID NO: 209 - DNA, 20 bp, synthetic construct
  source 1..20: mol_type = other DNA
agaggccttgccaggcactg

SEQ ID NO: 210 - DNA, 20 bp, synthetic construct
  source 1..20: mol_type = other DNA
cagaggccttgccaggcact

SEQ ID NO: 211 - DNA, 20 bp, synthetic construct
  source 1..20: mol_type = other DNA
gcagaggccttgccaggcac

SEQ ID NO: 212 - DNA, 20 bp, synthetic construct
  source 1..20: mol_type = other DNA
ggcagaggccttgccaggca

SEQ ID NO: 213 - DNA, 20 bp, synthetic construct
  source 1..20: mol_type = other DNA
gggcagaggccttgccaggc

SEQ ID NO: 214 - DNA, 20 bp, synthetic construct
  source 1..20: mol_type = other DNA
ctttgcctcaaaggccaggg

SEQ ID NO: 215 - DNA, 20 bp, synthetic construct
  source 1..20: mol_type = other DNA
cctttgcctcaaaggccagg

SEQ ID NO: 216 - DNA, 20 bp, synthetic construct
  source 1..20: mol_type = other DNA
gcctttgcctcaaaggccag

SEQ ID NO: 217 - DNA, 20 bp, synthetic construct
  source 1..20: mol_type = other DNA
ggcctttgcctcaaaggcca

SEQ ID NO: 218 - DNA, 20 bp, synthetic construct
  source 1..20: mol_type = other DNA
tggcctttgcctcaaaggcc

SEQ ID NO: 219 - DNA, 20 bp, synthetic construct
  source 1..20: mol_type = other DNA
ctggcctttgcctcaaaggc

SEQ ID NO: 220 - DNA, 20 bp, synthetic construct
  source 1..20: mol_type = other DNA
gctggcctttgcctcaaagg

SEQ ID NO: 221 - DNA, 20 bp, synthetic construct
  source 1..20: mol_type = other DNA
tgctggcctttgcctcaaag

SEQ ID NO: 222 - DNA, 20 bp, synthetic construct
  source 1..20: mol_type = other DNA
ctgctggcctttgcctcaaa

SEQ ID NO: 223 - DNA, 20 bp, synthetic construct
  source 1..20: mol_type = other DNA
gctgctggcctttgcctcaa

SEQ ID NO: 224 - DNA, 20 bp, synthetic construct
  source 1..20: mol_type = other DNA
tgctgctggcctttgcctca

SEQ ID NO: 225 - DNA, 20 bp, synthetic construct
  source 1..20: mol_type = other DNA
ctgctgctggcctttgcctc

SEQ ID NO: 226 - DNA, 20 bp, synthetic construct
  source 1..20: mol_type = other DNA
tctgctgctggcctttgcct

SEQ ID NO: 227 - DNA, 20 bp, synthetic construct
  source 1..20: mol_type = other DNA
atctgctgctggcctttgcc

SEQ ID NO: 228 - DNA, 20 bp, synthetic construct
  source 1..20: mol_type = other DNA
tatctgctgctggcctttgc

SEQ ID NO: 229 - DNA, 20 bp, synthetic construct
  source 1..20: mol_type = other DNA
ttatctgctgctggcctttg

SEQ ID NO: 230 - DNA, 20 bp, synthetic construct
  source 1..20: mol_type = other DNA
gttatctgctgctggccttt

SEQ ID NO: 231 - DNA, 20 bp, synthetic construct
  source 1..20: mol_type = other DNA
tgttatctgctgctggcctt

SEQ ID NO: 232 - DNA, 20 bp, synthetic construct
  source 1..20: mol_type = other DNA
ttgttatctgctgctggcct

SEQ ID NO: 233 - DNA, 20 bp, synthetic construct
  source 1..20: mol_type = other DNA
gttgttatctgctgctggcc

SEQ ID NO: 234 - DNA, 20 bp, synthetic construct
  source 1..20: mol_type = other DNA
ggttgttatctgctgctggc

SEQ ID NO: 235 - DNA, 20 bp, synthetic construct
  source 1..20: mol_type = other DNA
gggttgttatctgctgctgg

SEQ ID NO: 236 - DNA, 20 bp, synthetic construct
  source 1..20: mol_type = other DNA
acatcgctgatttgtccggg

SEQ ID NO: 237 - DNA, 20 bp, synthetic construct
  source 1..20: mol_type = other DNA
cacatcgctgatttgtccgg

SEQ ID NO: 238 - DNA, 20 bp, synthetic construct
  source 1..20: mol_type = other DNA
acacatcgctgatttgtccg

SEQ ID NO: 239 - DNA, 20 bp, synthetic construct
  source 1..20: mol_type = other DNA
gacacatcgctgatttgtcc

SEQ ID NO: 240 - DNA, 20 bp, synthetic construct
  source 1..20: mol_type = other DNA
tgacacatcgctgatttgtc

SEQ ID NO: 241 - DNA, 20 bp, synthetic construct
  source 1..20: mol_type = other DNA
gtgacacatcgctgatttgt

SEQ ID NO: 242 - DNA, 20 bp, synthetic construct
  source 1..20: mol_type = other DNA
ggtgacacatcgctgatttg

SEQ ID NO: 243 - DNA, 20 bp, synthetic construct
  source 1..20: mol_type = other DNA
gggtgacacatcgctgattt

SEQ ID NO: 244 - DNA, 20 bp, synthetic construct
  source 1..20: mol_type = other DNA
aagaaaaggtgggagactgg

SEQ ID NO: 245 - DNA, 20 bp, synthetic construct
  source 1..20: mol_type = other DNA
gaagaaaaggtgggagactg

SEQ ID NO: 246 - DNA, 20 bp, synthetic construct
  source 1..20: mol_type = other DNA
agaagaaaaggtgggagact

SEQ ID NO: 247 - DNA, 20 bp, synthetic construct
  source 1..20: mol_type = other DNA
tagaagaaaaggtgggagac

SEQ ID NO: 248 - DNA, 20 bp, synthetic construct
  source 1..20: mol_type = other DNA
ttagaagaaaaggtgggaga

SEQ ID NO: 249 - DNA, 20 bp, synthetic construct
  source 1..20: mol_type = other DNA
attagaagaaaaggtgggag

SEQ ID NO: 250 - DNA, 20 bp, synthetic construct
  source 1..20: mol_type = other DNA
cattagaagaaaaggtggga

SEQ ID NO: 251 - DNA, 20 bp, synthetic construct
  source 1..20: mol_type = other DNA
tcattagaagaaaaggtggg

SEQ ID NO: 252 - DNA, 20 bp, synthetic construct
  source 1..20: mol_type = other DNA
ctcattagaagaaaaggtgg

SEQ ID NO: 253 - DNA, 20 bp, synthetic construct
  source 1..20: mol_type = other DNA
actcattagaagaaaaggtg

SEQ ID NO: 254 - DNA, 20 bp, synthetic construct
  source 1..20: mol_type = other DNA
gactcattagaagaaaaggt

SEQ ID NO: 255 - DNA, 20 bp, synthetic construct
  source 1..20: mol_type = other DNA
cgactcattagaagaaaagg

SEQ ID NO: 256 - DNA, 20 bp, synthetic construct
  source 1..20: mol_type = other DNA
tcgactcattagaagaaaag

SEQ ID NO: 257 - DNA, 20 bp, synthetic construct
  source 1..20: mol_type = other DNA
gtcgactcattagaagaaaa

SEQ ID NO: 258 - DNA, 20 bp, synthetic construct
  source 1..20: mol_type = other DNA
agtcgactcattagaagaaa

SEQ ID NO: 259 - DNA, 20 bp, synthetic construct
  source 1..20: mol_type = other DNA
aagtcgactcattagaagaa

SEQ ID NO: 260 - DNA, 20 bp, synthetic construct
  source 1..20: mol_type = other DNA
aaagtcgactcattagaaga

SEQ ID NO: 261 - DNA, 20 bp, synthetic construct
  source 1..20: mol_type = other DNA
caaagtcgactcattagaag

SEQ ID NO: 262 - DNA, 20 bp, synthetic construct
  source 1..20: mol_type = other DNA
tcaaagtcgactcattagaa

SEQ ID NO: 263 - DNA, 20 bp, synthetic construct
  source 1..20: mol_type = other DNA
ctcaaagtcgactcattaga

SEQ ID NO: 264 - DNA, 20 bp, synthetic construct
  source 1..20: mol_type = other DNA
gctcaaagtcgactcattag

SEQ ID NO: 265 - DNA, 20 bp, synthetic construct
  source 1..20: mol_type = other DNA
agctcaaagtcgactcatta

SEQ ID NO: 266 - DNA, 20 bp, synthetic construct
  source 1..20: mol_type = other DNA
cagctcaaagtcgactcatt

SEQ ID NO: 267 - DNA, 20 bp, synthetic construct
  source 1..20: mol_type = other DNA
ccagctcaaagtcgactcat

SEQ ID NO: 268 - DNA, 20 bp, synthetic construct
  source 1..20: mol_type = other DNA
tccagctcaaagtcgactca

SEQ ID NO: 269 - DNA, 20 bp, synthetic construct
  source 1..20: mol_type = other DNA
ttccagctcaaagtcgactc

SEQ ID NO: 270 - DNA, 20 bp, synthetic construct
  source 1..20: mol_type = other DNA
tttccagctcaaagtcgact

SEQ ID NO: 271 - DNA, 20 bp, synthetic construct
  source 1..20: mol_type = other DNA
ctttccagctcaaagtcgac

SEQ ID NO: 272 - DNA, 20 bp, synthetic construct
  source 1..20: mol_type = other DNA
gctttccagctcaaagtcga

SEQ ID NO: 273 - DNA, 20 bp, synthetic construct
  source 1..20: mol_type = other DNA
tgctttccagctcaaagtcg

SEQ ID NO: 274 - DNA, 20 bp, synthetic construct
  source 1..20: mol_type = other DNA
ctgctttccagctcaaagtc

SEQ ID NO: 275 - DNA, 20 bp, synthetic construct
  source 1..20: mol_type = other DNA
gctgctttccagctcaaagt

SEQ ID NO: 276 - DNA, 20 bp, synthetic construct
  source 1..20: mol_type = other DNA
ggctgctttccagctcaaag

SEQ ID NO: 277 - DNA, 20 bp, synthetic construct
  source 1..20: mol_type = other DNA
cggctgctttccagctcaaa

SEQ ID NO: 278 - DNA, 20 bp, synthetic construct
  source 1..20: mol_type = other DNA
acggctgctttccagctcaa

SEQ ID NO: 279 - DNA, 20 bp, synthetic construct
  source 1..20: mol_type = other DNA
aacggctgctttccagctca

SEQ ID NO: 280 - DNA, 20 bp, synthetic construct
  source 1..20: mol_type = other DNA
aaacggctgctttccagctc

SEQ ID NO: 281 - DNA, 20 bp, synthetic construct
  source 1..20: mol_type = other DNA
gaaacggctgctttccagct

SEQ ID NO: 282 - DNA, 20 bp, synthetic construct
  source 1..20: mol_type = other DNA
agaaacggctgctttccagc

SEQ ID NO: 283 - DNA, 20 bp, synthetic construct
  source 1..20: mol_type = other DNA
gagaaacggctgctttccag

SEQ ID NO: 284 - DNA, 20 bp, synthetic construct
  source 1..20: mol_type = other DNA
ggagaaacggctgctttcca

SEQ ID NO: 285 - DNA, 16 bp, synthetic construct
  source 1..16: mol_type = other DNA
cctgctgcccgctcat

SEQ ID NO: 286 - DNA, 16 bp, synthetic construct
  source 1..16: mol_type = other DNA
ctgaccctgctgcccg

SEQ ID NO: 287 - DNA, 16 bp, synthetic construct
  source 1..16: mol_type = other DNA
cacttctgaccctgct

SEQ ID NO: 288 - DNA, 16 bp, synthetic construct
  source 1..16: mol_type = other DNA
gtcttgcttaggcaac

SEQ ID NO: 289 - DNA, 16 bp, synthetic construct
  source 1..16: mol_type = other DNA
ggtgcagagggcagag

SEQ ID NO: 290 - DNA, 16 bp, synthetic construct
  source 1..16: mol_type = other DNA
ccggaggtgcagaggg

SEQ ID NO: 291 - DNA, 16 bp, synthetic construct
  source 1..16: mol_type = other DNA
gcaggccggaggtgca

SEQ ID NO: 292 - DNA, 16 bp, synthetic construct
  source 1..16: mol_type = other DNA
gacatgcaggccggag

SEQ ID NO: 293 - DNA, 16 bp, synthetic construct
  source 1..16: mol_type = other DNA
acagggacatgcaggc

SEQ ID NO: 294 - DNA, 16 bp, synthetic construct
  source 1..16: mol_type = other DNA
aggccacagggacatg

SEQ ID NO: 295 - DNA, 16 bp, synthetic construct
  source 1..16: mol_type = other DNA
ccaagaggccacaggg

SEQ ID NO: 296 - DNA, 16 bp, synthetic construct
  source 1..16: mol_type = other DNA
tacccccaagaggcca

SEQ ID NO: 297 - DNA, 16 bp, synthetic construct
  source 1..16: mol_type = other DNA
agatgtacccccaaga

SEQ ID NO: 298 - DNA, 16 bp, synthetic construct
  source 1..16: mol_type = other DNA
ccgggagatgtacccc

SEQ ID NO: 299 - DNA, 16 bp, synthetic construct
  source 1..16: mol_type = other DNA
cagccccgggagatgt

SEQ ID NO: 300 - DNA, 16 bp, synthetic construct
  source 1..16: mol_type = other DNA
ccttctgacccagccc

SEQ ID NO: 301 - DNA, 16 bp, synthetic construct
  source 1..16: mol_type = other DNA
ccaggccttctgaccc

SEQ ID NO: 302 - DNA, 16 bp, synthetic construct
  source 1..16: mol_type = other DNA
accacccaggccttct

SEQ ID NO: 303 - DNA, 16 bp, synthetic construct
  source 1..16: mol_type = other DNA
ggccaaccacccaggc

SEQ ID NO: 304 - DNA, 16 bp, synthetic construct
  source 1..16: mol_type = other DNA
cctgaggccaaccacc

SEQ ID NO: 305 - DNA, 16 bp, synthetic construct
  source 1..16: mol_type = other DNA
gacagcctgaggccaa

SEQ ID NO: 306 - DNA, 16 bp, synthetic construct
  source 1..16: mol_type = other DNA
tgtgtgacagcctgag

SEQ ID NO: 307 - DNA, 16 bp, synthetic construct
  source 1..16: mol_type = other DNA
ctaggtgtgtgacagc

SEQ ID NO: 308 - DNA, 16 bp, synthetic construct
  source 1..16: mol_type = other DNA
tctccctaggtgtgtg

SEQ ID NO: 309 - DNA, 16 bp, synthetic construct
  source 1..16: mol_type = other DNA
gagcatctccctaggt

SEQ ID NO: 310 - DNA, 16 bp, synthetic construct
  source 1..16: mol_type = other DNA
aacgggagcatctccc

SEQ ID NO: 311 - DNA, 16 bp, synthetic construct
  source 1..16: mol_type = other DNA
ccagaaacgggagcat

SEQ ID NO: 312 - DNA, 16 bp, synthetic construct
  source 1..16: mol_type = other DNA
ggttcccagaaacggg

SEQ ID NO: 313 - DNA, 16 bp, synthetic construct
  source 1..16: mol_type = other DNA
gccaaggttcccagaa

SEQ ID NO: 314 - DNA, 16 bp, synthetic construct
  source 1..16: mol_type = other DNA
gtttgcaggagtcggg

SEQ ID NO: 315 - DNA, 16 bp, synthetic construct
  source 1..16: mol_type = other DNA
ccgaagtttgcaggag

SEQ ID NO: 316 - DNA, 16 bp, synthetic construct
  source 1..16: mol_type = other DNA
atttaccgaagtttgc

SEQ ID NO: 317 - DNA, 16 bp, synthetic construct
  source 1..16: mol_type = other DNA
tacacatttaccgaag

SEQ ID NO: 318 - DNA, 16 bp, synthetic construct
  source 1..16: mol_type = other DNA
cgagttacacatttac

SEQ ID NO: 319 - DNA, 16 bp, synthetic construct
  source 1..16: mol_type = other DNA
agggtcgagttacaca

SEQ ID NO: 320 - DNA, 16 bp, synthetic construct
  source 1..16: mol_type = other DNA
ggtgcagggtcgagtt

SEQ ID NO: 321 - DNA, 16 bp, synthetic construct
  source 1..16: mol_type = other DNA
gagccggtgcagggtc

SEQ ID NO: 322 - DNA, 16 bp, synthetic construct
  source 1..16: mol_type = other DNA
tgaacagagtgagccg

SEQ ID NO: 323 - DNA, 16 bp, synthetic construct
  source 1..16: mol_type = other DNA
gtttcactgctgaaca

SEQ ID NO: 324 - DNA, 16 bp, synthetic construct
  source 1..16: mol_type = other DNA
tcgatgcagagtttca

SEQ ID NO: 325 - DNA, 16 bp, synthetic construct
  source 1..16: mol_type = other DNA
gtcttagtgatcgatg

SEQ ID NO: 326 - DNA, 16 bp, synthetic construct
  source 1..16: mol_type = other DNA
cttccaggaagtctta

SEQ ID NO: 327 - DNA, 16 bp, synthetic construct
  source 1..16: mol_type = other DNA
ggacctcttccaggaa

SEQ ID NO: 328 - DNA, 16 bp, synthetic construct
  source 1..16: mol_type = other DNA
cgctgggacctcttcc

SEQ ID NO: 329 - DNA, 16 bp, synthetic construct
  source 1..16: mol_type = other DNA
actcacgctgggacct

SEQ ID NO: 330 - DNA, 16 bp, synthetic construct
  source 1..16: mol_type = other DNA
gcgacactcacgctgg

SEQ ID NO: 331 - DNA, 16 bp, synthetic construct
  source 1..16: mol_type = other DNA
cagaagcgacactcac

SEQ ID NO: 332 - DNA, 16 bp, synthetic construct
  source 1..16: mol_type = other DNA
gatgccagaagcgaca

SEQ ID NO: 333 - DNA, 16 bp, synthetic construct
  source 1..16: mol_type = other DNA
ggacagatgccagaag

SEQ ID NO: 334 - DNA, 16 bp, synthetic construct
  source 1..16: mol_type = other DNA
cagaaggacagatgcc

SEQ ID NO: 335 - DNA, 16 bp, synthetic construct
  source 1..16: mol_type = other DNA
ctggccagaaggacag

SEQ ID NO: 336 - DNA, 16 bp, synthetic construct
  source 1..16: mol_type = other DNA
acaggctggccagaag

SEQ ID NO: 337 - DNA, 16 bp, synthetic construct
  source 1..16: mol_type = other DNA
agaccacaggctggcc

SEQ ID NO: 338 - DNA, 16 bp, synthetic construct
  source 1..16: mol_type = other DNA
tggccagaccacaggc

SEQ ID NO: 339 - DNA, 16 bp, synthetic construct
  source 1..16: mol_type = other DNA
tcacttggccagacca

SEQ ID NO: 340 - DNA, 16 bp, synthetic construct
  source 1..16: mol_type = other DNA
ttacatcacttggcca

SEQ ID NO: 341 - DNA, 16 bp, synthetic construct
  source 1..16: mol_type = other DNA
gagggttacatcactt

SEQ ID NO: 342 - DNA, 16 bp, synthetic construct
  source 1..16: mol_type = other DNA
gagaggagggttacat

SEQ ID NO: 343 - DNA, 16 bp, synthetic construct
  source 1..16: mol_type = other DNA
tgcctgtgcacaggct

SEQ ID NO: 344 - DNA, 16 bp, synthetic construct
  source 1..16: mol_type = other DNA
caggctgcctgtgcac

SEQ ID NO: 345 - DNA, 16 bp, synthetic construct
  source 1..16: mol_type = other DNA
gttcccaggctgcctg

SEQ ID NO: 346 - DNA, 16 bp, synthetic construct
  source 1..16: mol_type = other DNA
gagctgttcccaggct

SEQ ID NO: 347 - DNA, 16 bp, synthetic construct
  source 1..16: mol_type = other DNA
ggatggagctgttccc

SEQ ID NO: 348 - DNA, 16 bp, synthetic construct
  source 1..16: mol_type = other DNA
tgccctatttatagct

SEQ ID NO: 349 - DNA, 16 bp, synthetic construct
  source 1..16: mol_type = other DNA
ctccaagacctcaggc

SEQ ID NO: 350 - DNA, 16 bp, synthetic construct
  source 1..16: mol_type = other DNA
cacctccaagacctca

SEQ ID NO: 351 - DNA, 16 bp, synthetic construct
  source 1..16: mol_type = other DNA
ggtcacctccaagacc

SEQ ID NO: 352 - DNA, 16 bp, synthetic construct
  source 1..16: mol_type = other DNA
cagggtcacctccaag

SEQ ID NO: 353 - DNA, 16 bp, synthetic construct
  source 1..16: mol_type = other DNA
gttcagggtcacctcc

SEQ ID NO: 354 - DNA, 16 bp, synthetic construct
  source 1..16: mol_type = other DNA
gcggttcagggtcacc

SEQ ID NO: 355 - DNA, 16 bp, synthetic construct
  source 1..16: mol_type = other DNA
gaatgggcggttcagg

SEQ ID NO: 356 - DNA, 16 bp, synthetic construct
  source 1..16: mol_type = other DNA
caggaatgggcggttc

SEQ ID NO: 357 - DNA, 16 bp, synthetic construct
  source 1..16: mol_type = other DNA
aaacaggaatgggcgg

SEQ ID NO: 358 - DNA, 16 bp, synthetic construct
  source 1..16: mol_type = other DNA
cagcaaacaggaatgg

SEQ ID NO: 359 - DNA, 16 bp, synthetic construct
  source 1..16: mol_type = other DNA
tacacagcaaacagga

SEQ ID NO: 360 - DNA, 16 bp, synthetic construct
  source 1..16: mol_type = other DNA
gatcatacacagcaaa

SEQ ID NO: 361 - DNA, 16 bp, synthetic construct
  source 1..16: mol_type = other DNA
tttgatcatacacagc

SEQ ID NO: 362 - DNA, 16 bp, synthetic construct
  source 1..16: mol_type = other DNA
cgctttgatcatacac

SEQ ID NO: 363 - DNA, 16 bp, synthetic construct
  source 1..16: mol_type = other DNA
ggaagtgcagggcagt

SEQ ID NO: 364 - DNA, 16 bp, synthetic construct
  source 1..16: mol_type = other DNA
acgcggcccaggaagt

SEQ ID NO: 365 - DNA, 16 bp, synthetic construct
  source 1..16: mol_type = other DNA
gccacgcggcccagga

SEQ ID NO: 366 - DNA, 16 bp, synthetic construct
  source 1..16: mol_type = other DNA
ttggccacgcggccca

SEQ ID NO: 367 - DNA, 16 bp, synthetic construct
  source 1..16: mol_type = other DNA
gggttggccacgcggc

SEQ ID NO: 368 - DNA, 16 bp, synthetic construct
  source 1..16: mol_type = other DNA
agcgggttggccacgc

SEQ ID NO: 369 - DNA, 16 bp, synthetic construct
  source 1..16: mol_type = other DNA
ctcagcgggttggcca

SEQ ID NO: 370 - DNA, 16 bp, synthetic construct
  source 1..16: mol_type = other DNA
gtgctcagcgggttgg

SEQ ID NO: 371 - DNA, 16 bp, synthetic construct
  source 1..16: mol_type = other DNA
gctgtgctcagcgggt

SEQ ID NO: 372 - DNA, 16 bp, synthetic construct
  source 1..16: mol_type = other DNA
atgctgtgctcagcgg

SEQ ID NO: 373 - DNA, 16 bp, synthetic construct
  source 1..16: mol_type = other DNA
catgctgtgctcagcg

SEQ ID NO: 374 - DNA, 16 bp, synthetic construct
  source 1..16: mol_type = other DNA
tcatgctgtgctcagc

SEQ ID NO: 375 - DNA, 16 bp, synthetic construct
  source 1..16: mol_type = other DNA
ctcatgctgtgctcag

SEQ ID NO: 376 - DNA, 16 bp, synthetic construct
  source 1..16: mol_type = other DNA
gcctcatgctgtgctc

SEQ ID NO: 377 - DNA, 16 bp, synthetic construct
  source 1..16: mol_type = other DNA
tggcctcatgctgtgc

SEQ ID NO: 378 - DNA, 16 bp, synthetic construct
  source 1..16: mol_type = other DNA
ctggcctcatgctgtg

SEQ ID NO: 379 - DNA, 16 bp, synthetic construct
  source 1..16: mol_type = other DNA
ccctggcctcatgctg

SEQ ID NO: 380 - DNA, 16 bp, synthetic construct
  source 1..16: mol_type = other DNA
gccctggcctcatgct

SEQ ID NO: 381 - DNA, 16 bp, synthetic construct
  source 1..16: mol_type = other DNA
ggcactgtgttctggg

SEQ ID NO: 382 - DNA, 16 bp, synthetic construct
  source 1..16: mol_type = other DNA
aggccttgccaggcac

SEQ ID NO: 383 - DNA, 16 bp, synthetic construct
  source 1..16: mol_type = other DNA
ggcagaggccttgcca

SEQ ID NO: 384 - DNA, 16 bp, synthetic construct
  source 1..16: mol_type = other DNA
tgcctcaaaggccagg

SEQ ID NO: 385 - DNA, 16 bp, synthetic construct
  source 1..16: mol_type = other DNA
ttgcctcaaaggccag

SEQ ID NO: 386 - DNA, 16 bp, synthetic construct
  source 1..16: mol_type = other DNA
tttgcctcaaaggcca

SEQ ID NO: 387 - DNA, 16 bp, synthetic construct
  source 1..16: mol_type = other DNA
ctttgcctcaaaggcc

SEQ ID NO: 388 - DNA, 16 bp, synthetic construct
  source 1..16: mol_type = other DNA
cctttgcctcaaaggc

SEQ ID NO: 389 - DNA, 16 bp, synthetic construct
  source 1..16: mol_type = other DNA
gcctttgcctcaaagg

SEQ ID NO: 390 - DNA, 16 bp, synthetic construct
  source 1..16: mol_type = other DNA
ggcctttgcctcaaag

SEQ ID NO: 391 - DNA, 16 bp, synthetic construct
  source 1..16: mol_type = other DNA
tggcctttgcctcaaa

SEQ ID NO: 392 - DNA, 16 bp, synthetic construct
  source 1..16: mol_type = other DNA
ctggcctttgcctcaa

SEQ ID NO: 393 - DNA, 16 bp, synthetic construct
  source 1..16: mol_type = other DNA
gctggcctttgcctca

SEQ ID NO: 394 - DNA, 16 bp, synthetic construct
  source 1..16: mol_type = other DNA
ccagctcaaagtcgac

SEQ ID NO: 395 - DNA, 16 bp, synthetic construct
  source 1..16: mol_type = other DNA
tccagctcaaagtcga

SEQ ID NO: 396 - DNA, 16 bp, synthetic construct
  source 1..16: mol_type = other DNA
ttccagctcaaagtcg

SEQ ID NO: 397 - DNA, 16 bp, synthetic construct
  source 1..16: mol_type = other DNA
tttccagctcaaagtc

SEQ ID NO: 398 - DNA, 16 bp, synthetic construct
  source 1..16: mol_type = other DNA
gctttccagctcaaag

SEQ ID NO: 399 - DNA, 16 bp, synthetic construct
  source 1..16: mol_type = other DNA
cggctgctttccagct

SEQ ID NO: 400 - DNA, 16 bp, synthetic construct
  source 1..16: mol_type = other DNA
aacggctgctttccag

SEQ ID NO: 401 - DNA, 16 bp, synthetic construct
  source 1..16: mol_type = other DNA
aaacggctgctttcca

SEQ ID NO: 402 - DNA, 16 bp, synthetic construct
  source 1..16: mol_type = other DNA
gaaacggctgctttcc

SEQ ID NO: 403 - DNA, 16 bp, synthetic construct
  source 1..16: mol_type = other DNA
agaaacggctgctttc

SEQ ID NO: 404 - DNA, 16 bp, synthetic construct
  source 1..16: mol_type = other DNA
gagaaacggctgcttt

SEQ ID NO: 405 - DNA, 16 bp, synthetic construct
  source 1..16: mol_type = other DNA
ggagaaacggctgctt

SEQ ID NO: 406 - DNA, 16 bp, synthetic construct
  source 1..16: mol_type = other DNA
aggagaaacggctgct

SEQ ID NO: 407 - DNA, 16 bp, synthetic construct
  source 1..16: mol_type = other DNA
aaggagaaacggctgc

SEQ ID NO: 408 - DNA, 16 bp, synthetic construct
  source 1..16: mol_type = other DNA
caaggagaaacggctg

SEQ ID NO: 409 - DNA, 16 bp, synthetic construct
  source 1..16: mol_type = other DNA
accaaggagaaacggc

SEQ ID NO: 410 - DNA, 16 bp, synthetic construct
  source 1..16: mol_type = other DNA
gaccaaggagaaacgg

SEQ ID NO: 411 - DNA, 16 bp, synthetic construct
  source 1..16: mol_type = other DNA
agaccaaggagaaacg

SEQ ID NO: 412 - DNA, 16 bp, synthetic construct
  source 1..16: mol_type = other DNA
tagaccaaggagaaac

SEQ ID NO: 413 - DNA, 16 bp, synthetic construct
  source 1..16: mol_type = other DNA
ttagaccaaggagaaa

SEQ ID NO: 414 - DNA, 16 bp, synthetic construct
  source 1..16: mol_type = other DNA
acttagaccaaggaga

SEQ ID NO: 415 - DNA, 16 bp, synthetic construct
  source 1..16: mol_type = other DNA
cacttagaccaaggag

SEQ ID NO: 416 - DNA, 16 bp, synthetic construct
  source 1..16: mol_type = other DNA
acacttagaccaagga

SEQ ID NO: 417 - DNA, 16 bp, synthetic construct
  source 1..16: mol_type = other DNA
agcacacttagaccaa

SEQ ID NO: 418 - DNA, 16 bp, synthetic construct
  source 1..16: mol_type = other DNA
cagcacacttagacca

SEQ ID NO: 419 - DNA, 16 bp, synthetic construct
  source 1..16: mol_type = other DNA
gcagcacacttagacc

SEQ ID NO: 420 - DNA, 16 bp, synthetic construct
  source 1..16: mol_type = other DNA
tgcagcacacttagac

SEQ ID NO: 421 - DNA, 16 bp, synthetic construct
  source 1..16: mol_type = other DNA
atgcagcacacttaga

SEQ ID NO: 422 - DNA, 16 bp, synthetic construct
  source 1..16: mol_type = other DNA
catgcagcacacttag

SEQ ID NO: 423 - DNA, 16 bp, synthetic construct
  source 1..16: mol_type = other DNA
ccatgcagcacactta

SEQ ID NO: 424 - DNA, 16 bp, synthetic construct
  source 1..16: mol_type = other DNA
tccatgcagcacactt

SEQ ID NO: 425 - DNA, 16 bp, synthetic construct
  source 1..16: mol_type = other DNA
ctccatgcagcacact

SEQ ID NO: 426 - DNA, 16 bp, synthetic construct
  source 1..16: mol_type = other DNA
actccatgcagcacac

SEQ ID NO: 427 - DNA, 16 bp, synthetic construct
  source 1..16: mol_type = other DNA
cactccatgcagcaca

SEQ ID NO: 428 - DNA, 16 bp, synthetic construct
  source 1..16: mol_type = other DNA
tcactccatgcagcac

SEQ ID NO: 429 - DNA, 16 bp, synthetic construct
  source 1..16: mol_type = other DNA
gctgcaggcttctact

SEQ ID NO: 430 - DNA, 16 bp, synthetic construct
  source 1..16: mol_type = other DNA
cgctgcaggcttctac

SEQ ID NO: 431 - DNA, 16 bp, synthetic construct
  source 1..16: mol_type = other DNA
ccgctgcaggcttcta

SEQ ID NO: 432 - DNA, 16 bp, synthetic construct
  source 1..16: mol_type = other DNA
gccgctgcaggcttct

SEQ ID NO: 433 - DNA, 16 bp, synthetic construct
  source 1..16: mol_type = other DNA
gtgccgctgcaggctt

SEQ ID NO: 434 - DNA, 16 bp, synthetic construct
  source 1..16: mol_type = other DNA
tgtgccgctgcaggct

SEQ ID NO: 435 - DNA, 16 bp, synthetic construct
  source 1..16: mol_type = other DNA
ttgtgccgctgcaggc

SEQ ID NO: 436 - DNA, 16 bp, synthetic construct
  source 1..16: mol_type = other DNA
tttgtgccgctgcagg

SEQ ID NO: 437 - DNA, 16 bp, synthetic construct
  source 1..16: mol_type = other DNA
atttgtgccgctgcag

SEQ ID NO: 438 - DNA, 16 bp, synthetic construct
  source 1..16: mol_type = other DNA
catttgtgccgctgca

SEQ ID NO: 439 - DNA, 16 bp, synthetic construct
  source 1..16: mol_type = other DNA
gcatttgtgccgctgc

SEQ ID NO: 440 - DNA, 16 bp, synthetic construct
  source 1..16: mol_type = other DNA
tgcatttgtgccgctg

SEQ ID NO: 441 - DNA, 16 bp, synthetic construct
  source 1..16: mol_type = other DNA
gtgcatttgtgccgct

SEQ ID NO: 442 - DNA, 16 bp, synthetic construct
  source 1..16: mol_type = other DNA
aggtgcatttgtgccg

SEQ ID NO: 443 - DNA, 16 bp, synthetic construct
  source 1..16: mol_type = other DNA
gaggtgcatttgtgcc

SEQ ID NO: 444 - DNA, 16 bp, synthetic construct
  source 1..16: mol_type = other DNA
ggaggtgcatttgtgc

SEQ ID NO: 445 - DNA, 16 bp, synthetic construct
  source 1..16: mol_type = other DNA
gggaggtgcatttgtg

SEQ ID NO: 446 - DNA, 16 bp, synthetic construct
  source 1..16: mol_type = other DNA
tgggaggtgcatttgt

SEQ ID NO: 447 - DNA, 16 bp, synthetic construct
  source 1..16: mol_type = other DNA
ctgggaggtgcatttg

SEQ ID NO: 448 - DNA, 16 bp, synthetic construct
  source 1..16: mol_type = other DNA
actgggaggtgcattt

SEQ ID NO: 449 - DNA, 16 bp, synthetic construct
  source 1..16: mol_type = other DNA
aactgggaggtgcatt

SEQ ID NO: 450 - DNA, 16 bp, synthetic construct
  source 1..16: mol_type = other DNA
aaactgggaggtgcat

SEQ ID NO: 451 - DNA, 16 bp, synthetic construct
  source 1..16: mol_type = other DNA
caaactgggaggtgca

SEQ ID NO: 452 - DNA, 16 bp, synthetic construct
  source 1..16: mol_type = other DNA
gcaaactgggaggtgc

SEQ ID NO: 453 - DNA, 16 bp, synthetic construct
  source 1..16: mol_type = other DNA
agcaaactgggaggtg

SEQ ID NO: 454 - DNA, 16 bp, synthetic construct
  source 1..16: mol_type = other DNA
acccagcaaactggga

SEQ ID NO: 455 - DNA, 16 bp, synthetic construct
  source 1..16: mol_type = other DNA
aacccagcaaactggg

SEQ ID NO: 456 - DNA, 16 bp, synthetic construct
  source 1..16: mol_type = other DNA
taaacccagcaaactg

SEQ ID NO: 457 - DNA, 16 bp, synthetic construct
  source 1..16: mol_type = other DNA
ataaacccagcaaact

SEQ ID NO: 458 - DNA, 16 bp, synthetic construct
  source 1..16: mol_type = other DNA
ccccattctctaaaat

SEQ ID NO: 459 - DNA, 16 bp, synthetic construct
  source 1..16: mol_type = other DNA
cccccattctctaaaa

SEQ ID NO: 460 - DNA, 16 bp, synthetic construct
  source 1..16: mol_type = other DNA
acccccattctctaaa

SEQ ID NO: 461 - DNA, 16 bp, synthetic construct
  source 1..16: mol_type = other DNA
cacccccattctctaa

SEQ ID NO: 462 - DNA, 16 bp, synthetic construct
  source 1..16: mol_type = other DNA
ccacccccattctcta

SEQ ID NO: 463 - DNA, 16 bp, synthetic construct
  source 1..16: mol_type = other DNA
gttcttgcctccccac

SEQ ID NO: 464 - DNA, 16 bp, synthetic construct
  source 1..16: mol_type = other DNA
ggttcttgcctcccca

SEQ ID NO: 465 - DNA, 16 bp, synthetic construct
  source 1..16: mol_type = other DNA
tggttcttgcctcccc

SEQ ID NO: 466 - DNA, 16 bp, synthetic construct
  source 1..16: mol_type = other DNA
ctggttcttgcctccc

SEQ ID NO: 467 - DNA, 16 bp, synthetic construct
  source 1..16: mol_type = other DNA
actggttcttgcctcc

SEQ ID NO: 468 - DNA, 16 bp, synthetic construct
  source 1..16: mol_type = other DNA
cactggttcttgcctc

SEQ ID NO: 469 - DNA, 16 bp, synthetic construct
  source 1..16: mol_type = other DNA
acactggttcttgcct

SEQ ID NO: 470 - DNA, 16 bp, synthetic construct
  source 1..16: mol_type = other DNA
aacactggttcttgcc

SEQ ID NO: 471 - DNA, 16 bp, synthetic construct
  source 1..16: mol_type = other DNA
aaacactggttcttgc

SEQ ID NO: 472 - DNA, 16 bp, synthetic construct
  source 1..16: mol_type = other DNA
taaacactggttcttg

SEQ ID NO: 473 - DNA, 16 bp, synthetic construct
  source 1..16: mol_type = other DNA
ctaaacactggttctt

SEQ ID NO: 474 - DNA, 16 bp, synthetic construct
  source 1..16: mol_type = other DNA
gctaaacactggttct

SEQ ID NO: 475 - DNA, 16 bp, synthetic construct
  source 1..16: mol_type = other DNA
cgctaaacactggttc

SEQ ID NO: 476 - DNA, 16 bp, synthetic construct
  source 1..16: mol_type = other DNA
gcgctaaacactggtt

SEQ ID NO: 477 - DNA, 16 bp, synthetic construct
  source 1..16: mol_type = other DNA
cgcgctaaacactggt

SEQ ID NO: 478 - DNA, 16 bp, synthetic construct
  source 1..16: mol_type = other DNA
ccgcgctaaacactgg

SEQ ID NO: 479 - DNA, 16 bp, synthetic construct
  source 1..16: mol_type = other DNA
cccgcgctaaacactg

SEQ ID NO: 480 - DNA, 16 bp, synthetic construct
  source 1..16: mol_type = other DNA
tcccgcgctaaacact

SEQ ID NO: 481 - DNA, 16 bp, synthetic construct
  source 1..16: mol_type = other DNA
gtcccgcgctaaacac

SEQ ID NO: 482 - DNA, 16 bp, synthetic construct
  source 1..16: mol_type = other DNA
agtcccgcgctaaaca

SEQ ID NO: 483 - DNA, 16 bp, synthetic construct
  source 1..16: mol_type = other DNA
tagtcccgcgctaaac

SEQ ID NO: 484 - DNA, 16 bp, synthetic construct
  source 1..16: mol_type = other DNA
agtagtcccgcgctaa

SEQ ID NO: 485 - DNA, 16 bp, synthetic construct
  source 1..16: mol_type = other DNA
cagtagtcccgcgcta

SEQ ID NO: 486 - DNA, 16 bp, synthetic construct
  source 1..16: mol_type = other DNA
acagtagtcccgcgct

SEQ ID NO: 487 - DNA, 16 bp, synthetic construct
  source 1..16: mol_type = other DNA
aacagtagtcccgcgc

SEQ ID NO: 488 - DNA, 16 bp, synthetic construct
  source 1..16: mol_type = other DNA
gaacagtagtcccgcg

SEQ ID NO: 489 - DNA, 16 bp, synthetic construct
  source 1..16: mol_type = other DNA
ggaacagtagtcccgc

SEQ ID NO: 490 - DNA, 16 bp, synthetic construct
  source 1..16: mol_type = other DNA
tggaacagtagtcccg

SEQ ID NO: 491 - DNA, 16 bp, synthetic construct
  source 1..16: mol_type = other DNA
ttggaacagtagtccc

SEQ ID NO: 492 - DNA, 16 bp, synthetic construct
  source 1..16: mol_type = other DNA
tttggaacagtagtcc

SEQ ID NO: 493 - DNA, 16 bp, synthetic construct
  source 1..16: mol_type = other DNA
ttttggaacagtagtc

SEQ ID NO: 494 - DNA, 16 bp, synthetic construct
  source 1..16: mol_type = other DNA
tttttggaacagtagt

SEQ ID NO: 495 - DNA, 16 bp, synthetic construct
  source 1..16: mol_type = other DNA
ctttttggaacagtag

SEQ ID NO: 496 - DNA, 16 bp, synthetic construct
  source 1..16: mol_type = other DNA
gaattctttttggaac

SEQ ID NO: 497 - DNA, 16 bp, synthetic construct
  source 1..16: mol_type = other DNA
ggaattctttttggaa

SEQ ID NO: 498 - DNA, 16 bp, synthetic construct
  source 1..16: mol_type = other DNA
tggaattctttttgga

SEQ ID NO: 499 - DNA, 16 bp, synthetic construct
  source 1..16: mol_type = other DNA
ttggaattctttttgg

SEQ ID NO: 500 - DNA, 16 bp, synthetic construct
  source 1..16: mol_type = other DNA
cggttggaattctttt

SEQ ID NO: 501 - DNA, 16 bp, synthetic construct
  source 1..16: mol_type = other DNA
tcggttggaattcttt

SEQ ID NO: 502 - DNA, 16 bp, synthetic construct
  source 1..16: mol_type = other DNA
gtcggttggaattctt

SEQ ID NO: 503 - DNA, 16 bp, synthetic construct
  source 1..16: mol_type = other DNA
ggtcggttggaattct

SEQ ID NO: 504 - DNA, 16 bp, synthetic construct
  source 1..16: mol_type = other DNA
ctggtcggttggaatt

SEQ ID NO: 505 - DNA, 16 bp, synthetic construct
  source 1..16: mol_type = other DNA
gctggtcggttggaat

SEQ ID NO: 506 - DNA, 16 bp, synthetic construct
  source 1..16: mol_type = other DNA
agctggtcggttggaa

SEQ ID NO: 507 - DNA, 16 bp, synthetic construct
  source 1..16: mol_type = other DNA
aagctggtcggttgga

SEQ ID NO: 508 - DNA, 16 bp, synthetic construct
  source 1..16: mol_type = other DNA
caagctggtcggttgg

SEQ ID NO: 509 - DNA, 16 bp, synthetic construct
  source 1..16: mol_type = other DNA
acaagctggtcggttg

SEQ ID NO: 510 - DNA, 16 bp, synthetic construct
  source 1..16: mol_type = other DNA
aacaagctggtcggtt

SEQ ID NO: 511 - DNA, 16 bp, synthetic construct
  source 1..16: mol_type = other DNA
aaacaagctggtcggt

SEQ ID NO: 512 - DNA, 16 bp, synthetic construct
  source 1..16: mol_type = other DNA
caaacaagctggtcgg

SEQ ID NO: 513 - DNA, 16 bp, synthetic construct
  source 1..16: mol_type = other DNA
cacaaacaagctggtc

SEQ ID NO: 514 - DNA, 16 bp, synthetic construct
  source 1..16: mol_type = other DNA
tcacaaacaagctggt

SEQ ID NO: 515 - DNA, 16 bp, synthetic construct
  source 1..16: mol_type = other DNA
ttcacaaacaagctgg

SEQ ID NO: 516 - DNA, 16 bp, synthetic construct
  source 1..16: mol_type = other DNA
tttcacaaacaagctg

SEQ ID NO: 517 - DNA, 16 bp, synthetic construct
  source 1..16: mol_type = other DNA
gtttcacaaacaagct

SEQ ID NO: 518 - DNA, 16 bp, synthetic construct
  source 1..16: mol_type = other DNA
tgtttcacaaacaagc

SEQ ID NO: 519 - DNA, 16 bp, synthetic construct
  source 1..16: mol_type = other DNA
ttgtttcacaaacaag

SEQ ID NO: 520 - DNA, 16 bp, synthetic construct
  source 1..16: mol_type = other DNA
agggaacacttttttg

SEQ ID NO: 521 - DNA, 16 bp, synthetic construct
  source 1..16: mol_type = other DNA
acttgaaaagggaaca

SEQ ID NO: 522 - DNA, 16 bp, synthetic construct
  source 1..16: mol_type = other DNA
aacttgaaaagggaac

SEQ ID NO: 523 - DNA, 16 bp, synthetic construct
  source 1..16: mol_type = other DNA
ctcaacttgaaaaggg

SEQ ID NO: 524 - DNA, 16 bp, synthetic construct
  source 1..16: mol_type = other DNA
ttgttctcaacttgaa

SEQ ID NO: 525 - DNA, 16 bp, synthetic construct
  source 1..16: mol_type = other DNA
tttgttctcaacttga

SEQ ID NO: 526 - DNA, 16 bp, synthetic construct
  source 1..16: mol_type = other DNA
cccaatttttgttctc

SEQ ID NO: 527 - DNA, 16 bp, synthetic construct
  source 1..16: mol_type = other DNA
acccaatttttgttct

SEQ ID NO: 528 - DNA, 16 bp, synthetic construct
  source 1..16: mol_type = other DNA
cgaaggcaatgcaaaa

SEQ ID NO: 529 - DNA, 16 bp, synthetic construct
  source 1..16: mol_type = other DNA
ccgaaggcaatgcaaa

SEQ ID NO: 530 - DNA, 16 bp, synthetic construct
  source 1..16: mol_type = other DNA
accgaaggcaatgcaa

SEQ ID NO: 531 - DNA, 16 bp, synthetic construct
  source 1..16: mol_type = other DNA
aaccgaaggcaatgca

SEQ ID NO: 532 - DNA, 16 bp, synthetic construct
  source 1..16: mol_type = other DNA
aaaccgaaggcaatgc

SEQ ID NO: 533 - DNA, 16 bp, synthetic construct
  source 1..16: mol_type = other DNA
caaaccgaaggcaatg

SEQ ID NO: 534 - DNA, 16 bp, synthetic construct
  source 1..16: mol_type = other DNA
acaaaccgaaggcaat

SEQ ID NO: 535 - DNA, 16 bp, synthetic construct
  source 1..16: mol_type = other DNA
tacaaaccgaaggcaa

SEQ ID NO: 536 - DNA, 16 bp, synthetic construct
  source 1..16: mol_type = other DNA
atacaaaccgaaggca

SEQ ID NO: 537 - DNA, 16 bp, synthetic construct
  source 1..16: mol_type = other DNA
aatacaaaccgaaggc

SEQ ID NO: 538 - DNA, 16 bp, synthetic construct
  source 1..16: mol_type = other DNA
aaatacaaaccgaagg

SEQ ID NO: 539 - DNA, 16 bp, synthetic construct
  source 1..16: mol_type = other DNA
taaatacaaaccgaag

SEQ ID NO: 540 - DNA, 16 bp, synthetic construct
  source 1..16: mol_type = other DNA
ctaaatacaaaccgaa

SEQ ID NO: 541 - DNA, 16 bp, synthetic construct
  source 1..16: mol_type = other DNA
actaaatacaaaccga

SEQ ID NO: 542 - DNA, 16 bp, synthetic construct
  source 1..16: mol_type = other DNA
cactaaatacaaaccg

SEQ ID NO: 543 - DNA, 16 bp, synthetic construct
  source 1..16: mol_type = other DNA
gacactaaatacaaac

SEQ ID NO: 544 - DNA, 16 bp, synthetic construct
  source 1..16: mol_type = other DNA
caagacactaaataca

SEQ ID NO: 545 - DNA, 16 bp, synthetic construct
  source 1..16: mol_type = other DNA
tcaagacactaaatac

SEQ ID NO: 546 - DNA, 16 bp, synthetic construct
  source 1..16: mol_type = other DNA
ttcaagacactaaata

SEQ ID NO: 547 - DNA, 16 bp, synthetic construct
  source 1..16: mol_type = other DNA
attcaagacactaaat

SEQ ID NO: 548 - DNA, 16 bp, synthetic construct
  source 1..16: mol_type = other DNA
cattcaagacactaaa

SEQ ID NO: 549 - DNA, 16 bp, synthetic construct
  source 1..16: mol_type = other DNA
acattcaagacactaa

SEQ ID NO: 550 - DNA, 16 bp, synthetic construct
  source 1..16: mol_type = other DNA
ttacattcaagacact

SEQ ID NO: 551 - DNA, 16 bp, synthetic construct
  source 1..16: mol_type = other DNA
cttacattcaagacac

SEQ ID NO: 552 - DNA, 16 bp, synthetic construct
  source 1..16: mol_type = other DNA
tcttacattcaagaca

SEQ ID NO: 553 - DNA, 16 bp, synthetic construct
  source 1..16: mol_type = other DNA
ttcttacattcaagac

SEQ ID NO: 554 - DNA, 16 bp, synthetic construct
  source 1..16: mol_type = other DNA
atgttcttacattcaa

SEQ ID NO: 555 - DNA, 16 bp, synthetic construct
  source 1..16: mol_type = other DNA
gtcatgttcttacatt

SEQ ID NO: 556 - DNA, 16 bp, synthetic construct
  source 1..16: mol_type = other DNA
aggtcatgttcttaca

SEQ ID NO: 557 - DNA, 16 bp, synthetic construct
  source 1..16: mol_type = other DNA
gaggtcatgttcttac

SEQ ID NO: 558 - DNA, 16 bp, synthetic construct
  source 1..16: mol_type = other DNA
ggaggtcatgttctta

SEQ ID NO: 559 - DNA, 16 bp, synthetic construct
  source 1..16: mol_type = other DNA
cggaggtcatgttctt

SEQ ID NO: 560 - DNA, 16 bp, synthetic construct
  source 1..16: mol_type = other DNA
acggaggtcatgttct

SEQ ID NO: 561 - DNA, 16 bp, synthetic construct
  source 1..16: mol_type = other DNA
cacggaggtcatgttc

SEQ ID NO: 562 - DNA, 16 bp, synthetic construct
  source 1..16: mol_type = other DNA
tggaggcttattgtgg

SEQ ID NO: 563 - DNA, 16 bp, synthetic construct
  source 1..16: mol_type = other DNA
ttggaggcttattgtg

SEQ ID NO: 564 - DNA, 16 bp, synthetic construct
  source 1..16: mol_type = other DNA
tttggaggcttattgt

SEQ ID NO: 565 - DNA, 16 bp, synthetic construct
  source 1..16: mol_type = other DNA
cggcttaccttctgct

SEQ ID NO: 566 - DNA, 16 bp, synthetic construct
  source 1..16: mol_type = other DNA
cctcccggccttttcc

SEQ ID NO: 567 - DNA, 16 bp, synthetic construct
  source 1..16: mol_type = other DNA
tagggtgaccactctg

SEQ ID NO: 568 - DNA, 16 bp, synthetic construct
  source 1..16: mol_type = other DNA
agcaaatcgaggttca

SEQ ID NO: 569 - DNA, 16 bp, synthetic construct
  source 1..16: mol_type = other DNA
tattagttctcttcag

SEQ ID NO: 570 - DNA, 16 bp, synthetic construct
  source 1..16: mol_type = other DNA
ccttttagcttatccc

SEQ ID NO: 571 - DNA, 16 bp, synthetic construct
  source 1..16: mol_type = other DNA
aatctgccttttagct

SEQ ID NO: 572 - DNA, 16 bp, synthetic construct
  source 1..16: mol_type = other DNA
caatctacgctgccct

SEQ ID NO: 573 - DNA, 16 bp, synthetic construct
  source 1..16: mol_type = other DNA
agcaccaatctacgct

SEQ ID NO: 574 - DNA, 16 bp, synthetic construct
  source 1..16: mol_type = other DNA
catcctggagaagtag

SEQ ID NO: 575 - DNA, 16 bp, synthetic construct
  source 1..16: mol_type = other DNA
gcatcctggagaagta

SEQ ID NO: 576 - DNA, 16 bp, synthetic construct
  source 1..16: mol_type = other DNA
atacagcccacattcc

SEQ ID NO: 577 - DNA, 16 bp, synthetic construct
  source 1..16: mol_type = other DNA
ctgtaccatgtagtta

SEQ ID NO: 578 - DNA, 16 bp, synthetic construct
  source 1..16: mol_type = other DNA
ccacaccgggcactct

SEQ ID NO: 579 - DNA, 16 bp, synthetic construct
  source 1..16: mol_type = other DNA
cccaccacaccgggca

SEQ ID NO: 580 - DNA, 16 bp, synthetic construct
  source 1..16: mol_type = other DNA
ttccccaccacaccgg

SEQ ID NO: 581 - DNA, 16 bp, synthetic construct
  source 1..16: mol_type = other DNA
ttcaccctgcagcttt

SEQ ID NO: 582 - DNA, 16 bp, synthetic construct
  source 1..16: mol_type = other DNA
catagtcctcaccttc

SEQ ID NO: 583 - DNA, 16 bp, synthetic construct
  source 1..16: mol_type = other DNA
gtgaagatgacggctc

SEQ ID NO: 584 - DNA, 16 bp, synthetic construct
  source 1..16: mol_type = other DNA
tatgtctccctacttc

SEQ ID NO: 585 - DNA, 16 bp, synthetic construct
  source 1..16: mol_type = other DNA
gggagtaatggtgctc

SEQ ID NO: 586 - DNA, 16 bp, synthetic construct
  source 1..16: mol_type = other DNA
gtcctgggagtaatgg

SEQ ID NO: 587 - DNA, 16 bp, synthetic construct
  source 1..16: mol_type = other DNA
gggaaccgactgctgg

SEQ ID NO: 588 - DNA, 16 bp, synthetic construct
  source 1..16: mol_type = other DNA
cctgtgggaaccgact

SEQ ID NO: 589 - DNA, 16 bp, synthetic construct
  source 1..16: mol_type = other DNA
cctaatctagacagtc

SEQ ID NO: 590 - DNA, 16 bp, synthetic construct
  source 1..16: mol_type = other DNA
catccgctgttctcag

SEQ ID NO: 591 - DNA, 16 bp, synthetic construct
  source 1..16: mol_type = other DNA
ctccatccgctgttct

SEQ ID NO: 592 - DNA, 16 bp, synthetic construct
  source 1..16: mol_type = other DNA
gactccatccgctgtt

SEQ ID NO: 593 - DNA, 16 bp, synthetic construct
  source 1..16: mol_type = other DNA
tgactccatccgctgt

SEQ ID NO: 594 - DNA, 16 bp, synthetic construct
  source 1..16: mol_type = other DNA
gctgaagtacctggtg

SEQ ID NO: 595 - DNA, 16 bp, synthetic construct
  source 1..16: mol_type = other DNA
gccctcaacacggtgc

SEQ ID NO: 596 - DNA, 16 bp, synthetic construct
  source 1..16: mol_type = other DNA
tgccctcaacacggtg

SEQ ID NO: 597 - DNA, 16 bp, synthetic construct
  source 1..16: mol_type = other DNA
gtcattcttcttacat

SEQ ID NO: 598 - DNA, 16 bp, synthetic construct
  source 1..16: mol_type = other DNA
gcttccttggagctgt

SEQ ID NO: 599 - DNA, 16 bp, synthetic construct
  source 1..16: mol_type = other DNA
gtgtactgcaatatcg

SEQ ID NO: 600 - DNA, 16 bp, synthetic construct
  source 1..16: mol_type = other DNA
cactcatttcttgtgg

SEQ ID NO: 601 - DNA, 16 bp, synthetic construct
  source 1..16: mol_type = other DNA
ttgtaccacatctcac

SEQ ID NO: 602 - DNA, 16 bp, synthetic construct
  source 1..16: mol_type = other DNA
gttctctcaaaggcct

SEQ ID NO: 603 - DNA, 16 bp, synthetic construct
  source 1..16: mol_type = other DNA
gcagggtttagaaccc

SEQ ID NO: 604 - DNA, 16 bp, synthetic construct
  source 1..16: mol_type = other DNA
tatgtaagcagggttt

SEQ ID NO: 605 - DNA, 16 bp, synthetic construct
  source 1..16: mol_type = other DNA
aaaccagctctcaacc

SEQ ID NO: 606 - DNA, 16 bp, synthetic construct
  source 1..16: mol_type = other DNA
taagacatgctcctgc

SEQ ID NO: 607 - DNA, 16 bp, synthetic construct
  source 1..16: mol_type = other DNA
acttatggcagcccaa

SEQ ID NO: 608 - DNA, 16 bp, synthetic construct
  source 1..16: mol_type = other DNA
tacttatggcagccca

SEQ ID NO: 609 - DNA, 16 bp, synthetic construct
  source 1..16: mol_type = other DNA
ccattatttggagaca

SEQ ID NO: 610 - DNA, 16 bp, synthetic construct
  source 1..16: mol_type = other DNA
tgccatctaaccagat

SEQ ID NO: 611 - DNA, 16 bp, synthetic construct
  source 1..16: mol_type = other DNA
gttttcagtaatgccc

SEQ ID NO: 612 - DNA, 16 bp, synthetic construct
  source 1..16: mol_type = other DNA
cgggtcacgatgccct

SEQ ID NO: 613 - DNA, 16 bp, synthetic construct
  source 1..16: mol_type = other DNA
ccggccgggtcacgat

SEQ ID NO: 614 - DNA, 16 bp, synthetic construct
  source 1..16: mol_type = other DNA
cccccggccgggtcac

SEQ ID NO: 615 - DNA, 16 bp, synthetic construct
  source 1..16: mol_type = other DNA
cttcccccggccgggt

SEQ ID NO: 616 - DNA, 16 bp, synthetic construct
  source 1..16: mol_type = other DNA
cttcttcccccggccg

SEQ ID NO: 617 - DNA, 16 bp, synthetic construct
  source 1..16: mol_type = other DNA
cagcttcttcccccgg

SEQ ID NO: 618 - DNA, 16 bp, synthetic construct
  source 1..16: mol_type = other DNA
cggcagcttcttcccc

SEQ ID NO: 619 - DNA, 16 bp, synthetic construct
  source 1..16: mol_type = other DNA
caacggcagcttcttc

SEQ ID NO: 620 - DNA, 16 bp, synthetic construct
  source 1..16: mol_type = other DNA
gaacaacggcagcttc

SEQ ID NO: 621 - DNA, 16 bp, synthetic construct
  source 1..16: mol_type = other DNA
ccagaacaacggcagc

SEQ ID NO: 622 - DNA, 16 bp, synthetic construct
  source 1..16: mol_type = other DNA
tagtacccagaacaac

SEQ ID NO: 623 - DNA, 16 bp, synthetic construct
  source 1..16: mol_type = other DNA
ctgtagtacccagaac

SEQ ID NO: 624 - DNA, 16 bp, synthetic construct
  source 1..16: mol_type = other DNA
ctgctgtagtacccag

SEQ ID NO: 625 - DNA, 16 bp, synthetic construct
  source 1..16: mol_type = other DNA
cttctgctgtagtacc

SEQ ID NO: 626 - DNA, 16 bp, synthetic construct
  source 1..16: mol_type = other DNA
acccttctgctgtagt

SEQ ID NO: 627 - DNA, 16 bp, synthetic construct
  source 1..16: mol_type = other DNA
catacccttctgctgt

SEQ ID NO: 628 - DNA, 16 bp, synthetic construct
  source 1..16: mol_type = other DNA
ccgcatacccttctgc

SEQ ID NO: 629 - DNA, 16 bp, synthetic construct
  source 1..16: mol_type = other DNA
cttccgcatacccttc

SEQ ID NO: 630 - DNA, 16 bp, synthetic construct
  source 1..16: mol_type = other DNA
tcgcttccgcataccc

SEQ ID NO: 631 - DNA, 16 bp, synthetic construct
  source 1..16: mol_type = other DNA
tgctcgcttccgcata

SEQ ID NO: 632 - DNA, 16 bp, synthetic construct
  source 1..16: mol_type = other DNA
gggtgctcgcttccgc

SEQ ID NO: 633 - DNA, 16 bp, synthetic construct
  source 1..16: mol_type = other DNA
cggcaggagccatctc

SEQ ID NO: 634 - DNA, 16 bp, synthetic construct
  source 1..16: mol_type = other DNA
caccggcaggagccat

SEQ ID NO: 635 - DNA, 16 bp, synthetic construct
  source 1..16: mol_type = other DNA
tcacaccggcaggagc

SEQ ID NO: 636 - DNA, 16 bp, synthetic construct
  source 1..16: mol_type = other DNA
ggctcacaccggcagg

SEQ ID NO: 637 - DNA, 16 bp, synthetic construct
  source 1..16: mol_type = other DNA
gccctcaggctcacac

SEQ ID NO: 638 - DNA, 16 bp, synthetic construct
  source 1..16: mol_type = other DNA
gtggccctcaggctca

SEQ ID NO: 639 - DNA, 16 bp, synthetic construct
  source 1..16: mol_type = other DNA
cagaggatggtggccc

SEQ ID NO: 640 - DNA, 16 bp, synthetic construct
  source 1..16: mol_type = other DNA
cccggtcacctgcagc

SEQ ID NO: 641 - DNA, 16 bp, synthetic construct
  source 1..16: mol_type = other DNA
acacccggtcacctgc

SEQ ID NO: 642 - DNA, 16 bp, synthetic construct
  source 1..16: mol_type = other DNA
tgtacacccggtcacc

SEQ ID NO: 643 - DNA, 16 bp, synthetic construct
  source 1..16: mol_type = other DNA
gtatgtacacccggtc

SEQ ID NO: 644 - DNA, 16 bp, synthetic construct
  source 1..16: mol_type = other DNA
ggtgtatgtacacccg

SEQ ID NO: 645 - DNA, 16 bp, synthetic construct
  source 1..16: mol_type = other DNA
tgacgaggtggaaggg

SEQ ID NO: 646 - DNA, 16 bp, synthetic construct
  source 1..16: mol_type = other DNA
ggatgacgaggtggaa

SEQ ID NO: 647 - DNA, 16 bp, synthetic construct
  source 1..16: mol_type = other DNA
tgtggatgacgaggtg

SEQ ID NO: 648 - DNA, 16 bp, synthetic construct
  source 1..16: mol_type = other DNA
cattgtggatgacgag

SEQ ID NO: 649 - DNA, 16 bp, synthetic construct
  source 1..16: mol_type = other DNA
tctcattgtggatgac

SEQ ID NO: 650 - DNA, 16 bp, synthetic construct
  source 1..16: mol_type = other DNA
ctctcattgtggatga

SEQ ID NO: 651 - DNA, 16 bp, synthetic construct
  source 1..16: mol_type = other DNA
actctcattgtggatg

SEQ ID NO: 652 - DNA, 16 bp, synthetic construct
  source 1..16: mol_type = other DNA
tactctcattgtggat

SEQ ID NO: 653 - DNA, 16 bp, synthetic construct
  source 1..16: mol_type = other DNA
gtactctcattgtgga

SEQ ID NO: 654 - DNA, 16 bp, synthetic construct
  source 1..16: mol_type = other DNA
caggtactctcattgt

SEQ ID NO: 655 - DNA, 16 bp, synthetic construct
  source 1..16: mol_type = other DNA
acaggtactctcattg

SEQ ID NO: 656 - DNA, 16 bp, synthetic construct
  source 1..16: mol_type = other DNA
cacaggtactctcatt

SEQ ID NO: 657 - DNA, 16 bp, synthetic construct
  source 1..16: mol_type = other DNA
tcacaggtactctcat

SEQ ID NO: 658 - DNA, 16 bp, synthetic construct
  source 1..16: mol_type = other DNA
ctcacaggtactctca

SEQ ID NO: 659 - DNA, 16 bp, synthetic construct
  source 1..16: mol_type = other DNA
ctgctcacaggtactc

SEQ ID NO: 660 - DNA, 16 bp, synthetic construct
  source 1..16: mol_type = other DNA
ttgccagctgctcaca

SEQ ID NO: 661 - DNA, 16 bp, synthetic construct
  source 1..16: mol_type = other DNA
cctttgccagctgctc

SEQ ID NO: 662 - DNA, 16 bp, synthetic construct
  source 1..16: mol_type = other DNA
tggcctttgccagctg

SEQ ID NO: 663 - DNA, 16 bp, synthetic construct
  source 1..16: mol_type = other DNA
cattggcctttgccag

SEQ ID NO: 664 - DNA, 16 bp, synthetic construct
  source 1..16: mol_type = other DNA
cggcattggcctttgc

SEQ ID NO: 665 - DNA, 16 bp, synthetic construct
  source 1..16: mol_type = other DNA
tcccggcattggcctt

SEQ ID NO: 666 - DNA, 16 bp, synthetic construct
  source 1..16: mol_type = other DNA
gcttcccggcattggc

SEQ ID NO: 667 - DNA, 16 bp, synthetic construct
  source 1..16: mol_type = other DNA
tgggcttcccggcatt

SEQ ID NO: 668 - DNA, 16 bp, synthetic construct
  source 1..16: mol_type = other DNA
ctttgggcttcccggc

SEQ ID NO: 669 - DNA, 16 bp, synthetic construct
  source 1..16: mol_type = other DNA
ggtctttgggcttccc

SEQ ID NO: 670 - DNA, 16 bp, synthetic construct
  source 1..16: mol_type = other DNA
caggtatgaaggtggg

SEQ ID NO: 671 - DNA, 16 bp, synthetic construct
  source 1..16: mol_type = other DNA
gagcaggtatgaaggt

SEQ ID NO: 672 - DNA, 16 bp, synthetic construct
  source 1..16: mol_type = other DNA
ttggagcaggtatgaa

SEQ ID NO: 673 - DNA, 16 bp, synthetic construct
  source 1..16: mol_type = other DNA
gaattggagcaggtat

SEQ ID NO: 674 - DNA, 16 bp, synthetic construct
  source 1..16: mol_type = other DNA
tggcctgaattggagc

SEQ ID NO: 675 - DNA, 16 bp, synthetic construct
  source 1..16: mol_type = other DNA
tcttggcctgaattgg

SEQ ID NO: 676 - DNA, 16 bp, synthetic construct
  source 1..16: mol_type = other DNA
atgtcttggcctgaat

SEQ ID NO: 677 - DNA, 16 bp, synthetic construct
  source 1..16: mol_type = other DNA
gggatgtcttggcctg

SEQ ID NO: 678 - DNA, 16 bp, synthetic construct
  source 1..16: mol_type = other DNA
ggccttttcatccaca

SEQ ID NO: 679 - DNA, 16 bp, synthetic construct
  source 1..16: mol_type = other DNA
tagggccttttcatcc

SEQ ID NO: 680 - DNA, 16 bp, synthetic construct
  source 1..16: mol_type = other DNA
ctgtagggccttttca

SEQ ID NO: 681 - DNA, 16 bp, synthetic construct
  source 1..16: mol_type = other DNA
gtcctgtagggccttt

SEQ ID NO: 682 - DNA, 16 bp, synthetic construct
  source 1..16: mol_type = other DNA
ctggtcctgtagggcc

SEQ ID NO: 683 - DNA, 16 bp, synthetic construct
  source 1..16: mol_type = other DNA
ccagctggtcctgtag

SEQ ID NO: 684 - DNA, 16 bp, synthetic construct
  source 1..16: mol_type = other DNA
accagctggtcctgta

SEQ ID NO: 685 - DNA, 16 bp, synthetic construct
  source 1..16: mol_type = other DNA
tagcaccagctggtcc

SEQ ID NO: 686 - DNA, 16 bp, synthetic construct
  source 1..16: mol_type = other DNA
ctagcaccagctggtc

SEQ ID NO: 687 - DNA, 16 bp, synthetic construct
  source 1..16: mol_type = other DNA
actagcaccagctggt

SEQ ID NO: 688 - DNA, 16 bp, synthetic construct
  source 1..16: mol_type = other DNA
gactagcaccagctgg

SEQ ID NO: 689 - DNA, 16 bp, synthetic construct
  source 1..16: mol_type = other DNA
cgactagcaccagctg

SEQ ID NO: 690 - DNA, 16 bp, synthetic construct
  source 1..16: mol_type = other DNA
gcgactagcaccagct

SEQ ID NO: 691 - DNA, 16 bp, synthetic construct
  source 1..16: mol_type = other DNA
agcgactagcaccagc

SEQ ID NO: 692 - DNA, 16 bp, synthetic construct
  source 1..16: mol_type = other DNA
cagcgactagcaccag

SEQ ID NO: 693 - DNA, 16 bp, synthetic construct
  source 1..16: mol_type = other DNA
gcagcgactagcacca

SEQ ID NO: 694 - DNA, 16 bp, synthetic construct
  source 1..16: mol_type = other DNA
ttgcagcgactagcac

SEQ ID NO: 695 - DNA, 16 bp, synthetic construct
  source 1..16: mol_type = other DNA
tttgcagcgactagca

SEQ ID NO: 696 - DNA, 16 bp, synthetic construct
  source 1..16: mol_type = other DNA
ttttgcagcgactagc

SEQ ID NO: 697 - DNA, 16 bp, synthetic construct
  source 1..16: mol_type = other DNA
gttttgcagcgactag

SEQ ID NO: 698 - DNA, 16 bp, synthetic construct
  source 1..16: mol_type = other DNA
agttttgcagcgacta

SEQ ID NO: 699 - DNA, 16 bp, synthetic construct
  source 1..16: mol_type = other DNA
aagttttgcagcgact

SEQ ID NO: 700 - DNA, 16 bp, synthetic construct
  source 1..16: mol_type = other DNA
gtcaagttttgcagcg

SEQ ID NO: 701 - DNA, 16 bp, synthetic construct
  source 1..16: mol_type = other DNA
ggtgtcaagttttgca

SEQ ID NO: 702 - DNA, 16 bp, synthetic construct
  source 1..16: mol_type = other DNA
ttcggtgtcaagtttt

SEQ ID NO: 703 - DNA, 16 bp, synthetic construct
  source 1..16: mol_type = other DNA
gtcttcggtgtcaagt

SEQ ID NO: 704 - DNA, 16 bp, synthetic construct
  source 1..16: mol_type = other DNA
cttgtcttcggtgtca

SEQ ID NO: 705 - DNA, 16 bp, synthetic construct
  source 1..16: mol_type = other DNA
caacttgtcttcggtg

SEQ ID NO: 706 - DNA, 16 bp, synthetic construct
  source 1..16: mol_type = other DNA
cctcaacttgtcttcg

SEQ ID NO: 707 - DNA, 16 bp, synthetic construct
  source 1..16: mol_type = other DNA
ggccctcaacttgtct

SEQ ID NO: 708 - DNA, 16 bp, synthetic construct
  source 1..16: mol_type = other DNA
tgcggccctcaacttg

SEQ ID NO: 709 - DNA, 16 bp, synthetic construct
  source 1..16: mol_type = other DNA
cattgcggccctcaac

SEQ ID NO: 710 - DNA, 16 bp, synthetic construct
  source 1..16: mol_type = other DNA
gaccattgcggccctc

SEQ ID NO: 711 - DNA, 16 bp, synthetic construct
  source 1..16: mol_type = other DNA
cccgaccattgcggcc

SEQ ID NO: 712 - DNA, 16 bp, synthetic construct
  source 1..16: mol_type = other DNA
catcccgaccattgcg

SEQ ID NO: 713 - DNA, 16 bp, synthetic construct
  source 1..16: mol_type = other DNA
cagcatcccgaccatt

SEQ ID NO: 714 - DNA, 16 bp, synthetic construct
  source 1..16: mol_type = other DNA
ggccagcatcccgacc

SEQ ID NO: 715 - DNA, 16 bp, synthetic construct
  source 1..16: mol_type = other DNA
gttggccagcatcccg

SEQ ID NO: 716 - DNA, 16 bp, synthetic construct
  source 1..16: mol_type = other DNA
gaagttggccagcatc

SEQ ID NO: 717 - DNA, 16 bp, synthetic construct
  source 1..16: mol_type = other DNA
caagaagttggccagc

SEQ ID NO: 718 - DNA, 16 bp, synthetic construct
  source 1..16: mol_type = other DNA
gaagcccaagaagttg

SEQ ID NO: 719 - DNA, 16 bp, synthetic construct
  source 1..16: mol_type = other DNA
acggaagcccaagaag

SEQ ID NO: 720 - DNA, 16 bp, synthetic construct
  source 1..16: mol_type = other DNA
tatacggaagcccaag

SEQ ID NO: 721 - DNA, 16 bp, synthetic construct
  source 1..16: mol_type = other DNA
atatatacggaagccc

SEQ ID NO: 722 - DNA, 16 bp, synthetic construct
  source 1..16: mol_type = other DNA
gccatatatacggaag

SEQ ID NO: 723 - DNA, 16 bp, synthetic construct
  source 1..16: mol_type = other DNA
catgccatatatacgg

SEQ ID NO: 724 - DNA, 16 bp, synthetic construct
  source 1..16: mol_type = other DNA
gtgcatgccatatata

SEQ ID NO: 725 - DNA, 16 bp, synthetic construct
  source 1..16: mol_type = other DNA
actgtgcatgccatat

SEQ ID NO: 726 - DNA, 16 bp, synthetic construct
  source 1..16: mol_type = other DNA
ctcactgtgcatgcca

SEQ ID NO: 727 - DNA, 16 bp, synthetic construct
  source 1..16: mol_type = other DNA
tagctcactgtgcatg

SEQ ID NO: 728 - DNA, 16 bp, synthetic construct
  source 1..16: mol_type = other DNA
ccatagctcactgtgc

SEQ ID NO: 729 - DNA, 16 bp, synthetic construct
  source 1..16: mol_type = other DNA
gaccacgccccatagc

SEQ ID NO: 730 - DNA, 16 bp, synthetic construct
  source 1..16: mol_type = other DNA
atggaccacgccccat

SEQ ID NO: 731 - DNA, 16 bp, synthetic construct
  source 1..16: mol_type = other DNA
ccccatggaccacgcc

SEQ ID NO: 732 - DNA, 16 bp, synthetic construct
  source 1..16: mol_type = other DNA
tggccccatggaccac

SEQ ID NO: 733 - DNA, 16 bp, synthetic construct
  source 1..16: mol_type = other DNA
cggtggccccatggac

SEQ ID NO: 734 - DNA, 16 bp, synthetic construct
  source 1..16: mol_type = other DNA
ggacggtggccccatg

SEQ ID NO: 735 - DNA, 16 bp, synthetic construct
  source 1..16: mol_type = other DNA
agaggacggtggcccc

SEQ ID NO: 736 - DNA, 16 bp, synthetic construct
  source 1..16: mol_type = other DNA
gggagaggacggtggc

SEQ ID NO: 737 - DNA, 16 bp, synthetic construct
  source 1..16: mol_type = other DNA
gccaaagacagccgtt

SEQ ID NO: 738 - DNA, 16 bp, synthetic construct
  source 1..16: mol_type = other DNA
ggtgccaaagacagcc

SEQ ID NO: 739 - DNA, 16 bp, synthetic construct
  source 1..16: mol_type = other DNA
cagggtgccaaagaca

SEQ ID NO: 740 - DNA, 16 bp, synthetic construct
  source 1..16: mol_type = other DNA
aggccagggtgccaaa

SEQ ID NO: 741 - DNA, 16 bp, synthetic construct
  source 1..16: mol_type = other DNA
tcccagatagagagag

SEQ ID NO: 742 - DNA, 16 bp, synthetic construct
  source 1..16: mol_type = other DNA
ggctcccagatagaga

SEQ ID NO: 743 - DNA, 16 bp, synthetic construct
  source 1..16: mol_type = other DNA
caaggctcccagatag

SEQ ID NO: 744 - DNA, 16 bp, synthetic construct
  source 1..16: mol_type = other DNA
gtccaaggctcccaga

SEQ ID NO: 745 - DNA, 16 bp, synthetic construct
  source 1..16: mol_type = other DNA
gtggtccaaggctccc

SEQ ID NO: 746 - DNA, 16 bp, synthetic construct
  source 1..16: mol_type = other DNA
tgtgtggtccaaggct

SEQ ID NO: 747 - DNA, 16 bp, synthetic construct
  source 1..16: mol_type = other DNA
agctgtgtggtccaag

SEQ ID NO: 748 - DNA, 16 bp, synthetic construct
  source 1..16: mol_type = other DNA
gtcagctgtgtggtcc

SEQ ID NO: 749 - DNA, 16 bp, synthetic construct
  source 1..16: mol_type = other DNA
cagaggcatagtgagg

SEQ ID NO: 750 - DNA, 16 bp, synthetic construct
  source 1..16: mol_type = other DNA
ccaggtcagaggcata

SEQ ID NO: 751 - DNA, 16 bp, synthetic construct
  source 1..16: mol_type = other DNA
ttgtccaggtcagagg

SEQ ID NO: 752 - DNA, 16 bp, synthetic construct
  source 1..16: mol_type = other DNA
accttgtccaggtcag

SEQ ID NO: 753 - DNA, 16 bp, synthetic construct
  source 1..16: mol_type = other DNA
ccctccaccttgtcca

SEQ ID NO: 754 - DNA, 16 bp, synthetic construct
  source 1..16: mol_type = other DNA
gagaccctccaccttg

SEQ ID NO: 755 - DNA, 16 bp, synthetic construct
  source 1..16: mol_type = other DNA
aagtgagaccctccac

SEQ ID NO: 756 - DNA, 16 bp, synthetic construct
  source 1..16: mol_type = other DNA
tgctggaaagtgagac

SEQ ID NO: 757 - DNA, 16 bp, synthetic construct
  source 1..16: mol_type = other DNA
ttttgctggaaagtga

SEQ ID NO: 758 - DNA, 16 bp, synthetic construct
  source 1..16: mol_type = other DNA
gagttttgctggaaag

SEQ ID NO: 759 - DNA, 16 bp, synthetic construct
  source 1..16: mol_type = other DNA
agggagttttgctgga

SEQ ID NO: 760 - DNA, 16 bp, synthetic construct
  source 1..16: mol_type = other DNA
gttgagggagttttgc

SEQ ID NO: 761 - DNA, 16 bp, synthetic construct
  source 1..16: mol_type = other DNA
ccagttgagggagttt

SEQ ID NO: 762 - DNA, 16 bp, synthetic construct
  source 1..16: mol_type = other DNA
catccagttgagggag

SEQ ID NO: 763 - DNA, 16 bp, synthetic construct
  source 1..16: mol_type = other DNA
cttcatccagttgagg

SEQ ID NO: 764 - DNA, 16 bp, synthetic construct
  source 1..16: mol_type = other DNA
agatagtttcttcatc

SEQ ID NO: 765 - DNA, 16 bp, synthetic construct
  source 1..16: mol_type = other DNA
aggtggatggtccggg

SEQ ID NO: 766 - DNA, 16 bp, synthetic construct
  source 1..16: mol_type = other DNA
gtcaggtggatggtcc

SEQ ID NO: 767 - DNA, 16 bp, synthetic construct
  source 1..16: mol_type = other DNA
catggtcaggtggatg

SEQ ID NO: 768 - DNA, 16 bp, synthetic construct
  source 1..16: mol_type = other DNA
gggcatggtcaggtgg

SEQ ID NO: 769 - DNA, 16 bp, synthetic construct
  source 1..16: mol_type = other DNA
ccttgcagcaccagtt

SEQ ID NO: 770 - DNA, 16 bp, synthetic construct
  source 1..16: mol_type = other DNA
gatccttgcagcacca

SEQ ID NO: 771 - DNA, 16 bp, synthetic construct
  source 1..16: mol_type = other DNA
taagatccttgcagca

SEQ ID NO: 772 - DNA, 16 bp, synthetic construct
  source 1..16: mol_type = other DNA
tcataagatccttgca

SEQ ID NO: 773 - DNA, 16 bp, synthetic construct
  source 1..16: mol_type = other DNA
caggtcataagatcct

SEQ ID NO: 774 - DNA, 16 bp, synthetic construct
  source 1..16: mol_type = other DNA
ctgcaggtcataagat

SEQ ID NO: 775 - DNA, 16 bp, synthetic construct
  source 1..16: mol_type = other DNA
gtcctgcaggtcataa

SEQ ID NO: 776 - DNA, 16 bp, synthetic construct
  source 1..16: mol_type = other DNA
cgagcaggtcctgcag

SEQ ID NO: 777 - DNA, 16 bp, synthetic construct
  source 1..16: mol_type = other DNA
gggcgagcaggtcctg

SEQ ID NO: 778 - DNA, 16 bp, synthetic construct
  source 1..16: mol_type = other DNA
cctgggcgagcaggtc

SEQ ID NO: 779 - DNA, 16 bp, synthetic construct
  source 1..16: mol_type = other DNA
tggcgggcagctcagc

SEQ ID NO: 780 - DNA, 16 bp, synthetic construct
  source 1..16: mol_type = other DNA
gaatggcgggcagctc

SEQ ID NO: 781 - DNA, 16 bp, synthetic construct
  source 1..16: mol_type = other DNA
gcagaatggcgggcag

SEQ ID NO: 782 - DNA, 16 bp, synthetic construct
  source 1..16: mol_type = other DNA
tgtgcagaatggcggg

SEQ ID NO: 783 - DNA, 16 bp, synthetic construct
  source 1..16: mol_type = other DNA
cggtgtgcagaatggc

SEQ ID NO: 784 - DNA, 16 bp, synthetic construct
  source 1..16: mol_type = other DNA
gctcggtgtgcagaat

SEQ ID NO: 785 - DNA, 16 bp, synthetic construct
  source 1..16: mol_type = other DNA
tcagctcggtgtgcag

SEQ ID NO: 786 - DNA, 16 bp, synthetic construct
  source 1..16: mol_type = other DNA
ggttcagctcggtgtg

SEQ ID NO: 787 - DNA, 16 bp, synthetic construct
  source 1..16: mol_type = other DNA
gcaggttcagctcggt

SEQ ID NO: 788 - DNA, 16 bp, synthetic construct
  source 1..16: mol_type = other DNA
tttttgcaggttcagc

SEQ ID NO: 789 - DNA, 16 bp, synthetic construct
  source 1..16: mol_type = other DNA
caatttttgcaggttc

SEQ ID NO: 790 - DNA, 16 bp, synthetic construct
  source 1..16: mol_type = other DNA
gctcaatttttgcagg

SEQ ID NO: 791 - DNA, 16 bp, synthetic construct
  source 1..16: mol_type = other DNA
attgctcaatttttgc

SEQ ID NO: 792 - DNA, 16 bp, synthetic construct
  source 1..16: mol_type = other DNA
gtcattgctcaatttt

SEQ ID NO: 793 - DNA, 16 bp, synthetic construct
  source 1..16: mol_type = other DNA
gcggtcattgctcaat

SEQ ID NO: 794 - DNA, 16 bp, synthetic construct
  source 1..16: mol_type = other DNA
gatgcggtcattgctc

SEQ ID NO: 795 - DNA, 16 bp, synthetic construct
  source 1..16: mol_type = other DNA
cctgatgcggtcattg

SEQ ID NO: 796 - DNA, 16 bp, synthetic construct
  source 1..16: mol_type = other DNA
caccctgatgcggtca

SEQ ID NO: 797 - DNA, 16 bp, synthetic construct
  source 1..16: mol_type = other DNA
ccccaccctgatgcgg

SEQ ID NO: 798 - DNA, 16 bp, synthetic construct
  source 1..16: mol_type = other DNA
ctcccccaccctgatg

SEQ ID NO: 799 - DNA, 16 bp, synthetic construct
  source 1..16: mol_type = other DNA
gttcagcacctccccc

SEQ ID NO: 800 - DNA, 16 bp, synthetic construct
  source 1..16: mol_type = other DNA
gctgttcagcacctcc

SEQ ID NO: 801 - DNA, 16 bp, synthetic construct
  source 1..16: mol_type = other DNA
aatgctgttcagcacc

SEQ ID NO: 802 - DNA, 16 bp, synthetic construct
  source 1..16: mol_type = other DNA
aaaaatgctgttcagc

SEQ ID NO: 803 - DNA, 16 bp, synthetic construct
  source 1..16: mol_type = other DNA
cttcaagctcaaaaaa

SEQ ID NO: 804 - DNA, 16 bp, synthetic construct
  source 1..16: mol_type = other DNA
ccgcttcaagctcaaa

SEQ ID NO: 805 - DNA, 16 bp, synthetic construct
  source 1..16: mol_type = other DNA
catccgcttcaagctc

SEQ ID NO: 806 - DNA, 16 bp, synthetic construct
  source 1..16: mol_type = other DNA
tctcatccgcttcaag

SEQ ID NO: 807 - DNA, 16 bp, synthetic construct
  source 1..16: mol_type = other DNA
ctctctcatccgcttc

SEQ ID NO: 808 - DNA, 16 bp, synthetic construct
  source 1..16: mol_type = other DNA
gctctctctcatccgc

SEQ ID NO: 809 - DNA, 16 bp, synthetic construct
  source 1..16: mol_type = other DNA
gtgggctctctctcat

SEQ ID NO: 810 - DNA, 16 bp, synthetic construct
  source 1..16: mol_type = other DNA
actctgtgggctctct

SEQ ID NO: 811 - DNA, 16 bp, synthetic construct
  source 1..16: mol_type = other DNA
tagactctgtgggctc

SEQ ID NO: 812 - DNA, 16 bp, synthetic construct
  source 1..16: mol_type = other DNA
tgggtagactctgtgg

SEQ ID NO: 813 - DNA, 16 bp, synthetic construct
  source 1..16: mol_type = other DNA
agctgttgggtagact

SEQ ID NO: 814 - DNA, 16 bp, synthetic construct
  source 1..16: mol_type = other DNA
ttaagctgttgggtag

SEQ ID NO: 815 - DNA, 16 bp, synthetic construct
  source 1..16: mol_type = other DNA
ttgttaagctgttggg

SEQ ID NO: 816 - DNA, 16 bp, synthetic construct
  source 1..16: mol_type = other DNA
ggcttgttaagctgtt

SEQ ID NO: 817 - DNA, 16 bp, synthetic construct
  source 1..16: mol_type = other DNA
tcaggcttgttaagct

SEQ ID NO: 818 - DNA, 16 bp, synthetic construct
  source 1..16: mol_type = other DNA
acctcaggcttgttaa

SEQ ID NO: 819 - DNA, 16 bp, synthetic construct
  source 1..16: mol_type = other DNA
aagacctcaggcttgt

SEQ ID NO: 820 - DNA, 16 bp, synthetic construct
  source 1..16: mol_type = other DNA
acacggaggtcatgtt

SEQ ID NO: 821 - DNA, 16 bp, synthetic construct
  source 1..16: mol_type = other DNA
tacacggaggtcatgt

SEQ ID NO: 822 - DNA, 16 bp, synthetic construct
  source 1..16: mol_type = other DNA
ctacacggaggtcatg

SEQ ID NO: 823 - DNA, 16 bp, synthetic construct
  source 1..16: mol_type = other DNA
cactacacggaggtca

SEQ ID NO: 824 - DNA, 16 bp, synthetic construct
  source 1..16: mol_type = other DNA
acactacacggaggtc

SEQ ID NO: 825 - DNA, 16 bp, synthetic construct
  source 1..16: mol_type = other DNA
gacactacacggaggt

SEQ ID NO: 826 - DNA, 16 bp, synthetic construct
  source 1..16: mol_type = other DNA
agacactacacggagg

SEQ ID NO: 827 - DNA, 16 bp, synthetic construct
  source 1..16: mol_type = other DNA
cagacactacacggag

SEQ ID NO: 828 - DNA, 16 bp, synthetic construct
  source 1..16: mol_type = other DNA
acagacactacacgga

SEQ ID NO: 829 - DNA, 16 bp, synthetic construct
  source 1..16: mol_type = other DNA
tacagacactacacgg

SEQ ID NO: 830 - DNA, 16 bp, synthetic construct
  source 1..16: mol_type = other DNA
ttacagacactacacg

SEQ ID NO: 831 - DNA, 16 bp, synthetic construct
  source 1..16: mol_type = other DNA
attacagacactacac

SEQ ID NO: 832 - DNA, 16 bp, synthetic construct
  source 1..16: mol_type = other DNA
gtattacagacactac

SEQ ID NO: 833 - DNA, 16 bp, synthetic construct
  source 1..16: mol_type = other DNA
ctaaggtattacagac

SEQ ID NO: 834 - DNA, 16 bp, synthetic construct
  source 1..16: mol_type = other DNA
actaaggtattacaga

SEQ ID NO: 835 - DNA, 16 bp, synthetic construct
  source 1..16: mol_type = other DNA
aactaaggtattacag

SEQ ID NO: 836 - DNA, 16 bp, synthetic construct
  source 1..16: mol_type = other DNA
aaactaaggtattaca

SEQ ID NO: 837 - DNA, 16 bp, synthetic construct
  source 1..16: mol_type = other DNA
aaaactaaggtattac

SEQ ID NO: 838 - DNA, 16 bp, synthetic construct
  source 1..16: mol_type = other DNA
gtggaaaaaactaagg

SEQ ID NO: 839 - DNA, 16 bp, synthetic construct
  source 1..16: mol_type = other DNA
caagcatctgtggaaa

SEQ ID NO: 840 - DNA, 16 bp, synthetic construct
  source 1..16: mol_type = other DNA
cacaagcatctgtgga

SEQ ID NO: 841 - DNA, 16 bp, synthetic construct
  source 1..16: mol_type = other DNA
tcacaagcatctgtgg

SEQ ID NO: 842 - DNA, 16 bp, synthetic construct
  source 1..16: mol_type = other DNA
atcacaagcatctgtg

SEQ ID NO: 843 - DNA, 16 bp, synthetic construct
  source 1..16: mol_type = other DNA
aatcacaagcatctgt

SEQ ID NO: 844 - DNA, 16 bp, synthetic construct
  source 1..16: mol_type = other DNA
gtattgttcaaaaatc

SEQ ID NO: 845 - DNA, 16 bp, synthetic construct
  source 1..16: mol_type = other DNA
cgtattgttcaaaaat

SEQ ID NO: 846 - DNA, 16 bp, synthetic construct
  source 1..16: mol_type = other DNA
aggtgcttgcatcttt

SEQ ID NO: 847 - DNA, 16 bp, synthetic construct
  source 1..16: mol_type = other DNA
caggtgcttgcatctt

SEQ ID NO: 848 - DNA, 16 bp, synthetic construct
  source 1..16: mol_type = other DNA
tcaggtgcttgcatct

SEQ ID NO: 849 - DNA, 16 bp, synthetic construct
  source 1..16: mol_type = other DNA
ttcaggtgcttgcatc

SEQ ID NO: 850 - DNA, 16 bp, synthetic construct
  source 1..16: mol_type = other DNA
attcaggtgcttgcat

SEQ ID NO: 851 - DNA, 16 bp, synthetic construct
  source 1..16: mol_type = other DNA
aattcaggtgcttgca

SEQ ID NO: 852 - DNA, 16 bp, synthetic construct
  source 1..16: mol_type = other DNA
aaattcaggtgcttgc

SEQ ID NO: 853 - DNA, 16 bp, synthetic construct
  source 1..16: mol_type = other DNA
gaaattcaggtgcttg

SEQ ID NO: 854 - DNA, 16 bp, synthetic construct
  source 1..16: mol_type = other DNA
agaaattcaggtgctt

SEQ ID NO: 855 - DNA, 16 bp, synthetic construct
  source 1..16: mol_type = other DNA
acagaaattcaggtgc

SEQ ID NO: 856 - DNA, 16 bp, synthetic construct
  source 1..16: mol_type = other DNA
cgcattcaaacagaaa

SEQ ID NO: 857 - DNA, 16 bp, synthetic construct
  source 1..16: mol_type = other DNA
tccgcattcaaacaga

SEQ ID NO: 858 - DNA, 16 bp, synthetic construct
  source 1..16: mol_type = other DNA
ttccgcattcaaacag

SEQ ID NO: 859 - DNA, 16 bp, synthetic construct
  source 1..16: mol_type = other DNA
gttccgcattcaaaca

SEQ ID NO: 860 - DNA, 16 bp, synthetic construct
  source 1..16: mol_type = other DNA
ggttccgcattcaaac

SEQ ID NO: 861 - DNA, 16 bp, synthetic construct
  source 1..16: mol_type = other DNA
tggttccgcattcaaa

SEQ ID NO: 862 - DNA, 16 bp, synthetic construct
  source 1..16: mol_type = other DNA
atggttccgcattcaa

SEQ ID NO: 863 - DNA, 16 bp, synthetic construct
  source 1..16: mol_type = other DNA
tatggttccgcattca

SEQ ID NO: 864 - DNA, 16 bp, synthetic construct
  source 1..16: mol_type = other DNA
ctatggttccgcattc

SEQ ID NO: 865 - DNA, 16 bp, synthetic construct
  source 1..16: mol_type = other DNA
gctatggttccgcatt

SEQ ID NO: 866 - DNA, 16 bp, synthetic construct
  source 1..16: mol_type = other DNA
cagctatggttccgca

SEQ ID NO: 867 - DNA, 16 bp, synthetic construct
  source 1..16: mol_type = other DNA
ccagctatggttccgc

SEQ ID NO: 868 - DNA, 16 bp, synthetic construct
  source 1..16: mol_type = other DNA
accagctatggttccg

SEQ ID NO: 869 - DNA, 16 bp, synthetic construct
  source 1..16: mol_type = other DNA
aaccagctatggttcc

SEQ ID NO: 870 - DNA, 16 bp, synthetic construct
  source 1..16: mol_type = other DNA
taaccagctatggttc

SEQ ID NO: 871 - DNA, 16 bp, synthetic construct
  source 1..16: mol_type = other DNA
ataaccagctatggtt

SEQ ID NO: 872 - DNA, 16 bp, synthetic construct
  source 1..16: mol_type = other DNA
aaataaccagctatgg

SEQ ID NO: 873 - DNA, 16 bp, synthetic construct
  source 1..16: mol_type = other DNA
gaaataaccagctatg

SEQ ID NO: 874 - DNA, 16 bp, synthetic construct
  source 1..16: mol_type = other DNA
agaaataaccagctat

SEQ ID NO: 875 - DNA, 16 bp, synthetic construct
  source 1..16: mol_type = other DNA
ctaacacaagggagaa

SEQ ID NO: 876 - DNA, 16 bp, synthetic construct
  source 1..16: mol_type = other DNA
actaacacaagggaga

SEQ ID NO: 877 - DNA, 16 bp, synthetic construct
  source 1..16: mol_type = other DNA
ttactaacacaaggga

SEQ ID NO: 878 - DNA, 16 bp, synthetic construct
  source 1..16: mol_type = other DNA
attactaacacaaggg

SEQ ID NO: 879 - DNA, 16 bp, synthetic construct
  source 1..16: mol_type = other DNA
tattactaacacaagg

SEQ ID NO: 880 - DNA, 16 bp, synthetic construct
  source 1..16: mol_type = other DNA
ttattactaacacaag

SEQ ID NO: 881 - DNA, 16 bp, synthetic construct
  source 1..16: mol_type = other DNA
gtttattactaacaca

SEQ ID NO: 882 - DNA, 16 bp, synthetic construct
  source 1..16: mol_type = other DNA
cgtttattactaacac

SEQ ID NO: 883 - DNA, 16 bp, synthetic construct
  source 1..16: mol_type = other DNA
cttattgtggcaagac

SEQ ID NO: 884 - DNA, 16 bp, synthetic construct
  source 1..16: mol_type = other DNA
gcttattgtggcaaga

SEQ ID NO: 885 - DNA, 16 bp, synthetic construct
  source 1..16: mol_type = other DNA
ggcttattgtggcaag

SEQ ID NO: 886 - DNA, 16 bp, synthetic construct
  source 1..16: mol_type = other DNA
aggcttattgtggcaa

SEQ ID NO: 887 - DNA, 16 bp, synthetic construct
  source 1..16: mol_type = other DNA
gaggcttattgtggca

SEQ ID NO: 888 - DNA, 16 bp, synthetic construct
  source 1..16: mol_type = other DNA
ggaggcttattgtggc

SEQ ID NO: 889 - DNA, 16 bp, synthetic construct
  source 1..16: mol_type = other DNA
gcctgtcagctgtgtg

SEQ ID NO: 890 - DNA, 16 bp, synthetic construct
  source 1..16: mol_type = other DNA
gtagcctgtcagctgt

SEQ ID NO: 891 - DNA, 16 bp, synthetic construct
  source 1..16: mol_type = other DNA
cctgtagcctgtcagc

SEQ ID NO: 892 - DNA, 16 bp, synthetic construct
  source 1..16: mol_type = other DNA
ttgcctgtagcctgtc

SEQ ID NO: 893 - DNA, 16 bp, synthetic construct
  source 1..16: mol_type = other DNA
ggattgcctgtagcct

SEQ ID NO: 894 - DNA, 16 bp, synthetic construct
  source 1..16: mol_type = other DNA
ccaggattgcctgtag

SEQ ID NO: 895 - DNA, 16 bp, synthetic construct
  source 1..16: mol_type = other DNA
gaacacccaggattgc

SEQ ID NO: 896 - DNA, 16 bp, synthetic construct
  source 1..16: mol_type = other DNA
gtccttccaaggaaca

SEQ ID NO: 897 - DNA, 16 bp, synthetic construct
  source 1..16: mol_type = other DNA
cttgtccttccaagga

SEQ ID NO: 898 - DNA, 16 bp, synthetic construct
  source 1..16: mol_type = other DNA
gttcttgtccttccaa

SEQ ID NO: 899 - DNA, 16 bp, synthetic construct
  source 1..16: mol_type = other DNA
gcagttcttgtccttc

SEQ ID NO: 900 - DNA, 16 bp, synthetic construct
  source 1..16: mol_type = other DNA
ggtgcagttcttgtcc

SEQ ID NO: 901 - DNA, 16 bp, synthetic construct
  source 1..16: mol_type = other DNA
ggaggtgcagttcttg

SEQ ID NO: 902 - DNA, 16 bp, synthetic construct
  source 1..16: mol_type = other DNA
ccgggaggtgcagttc

SEQ ID NO: 903 - DNA, 16 bp, synthetic construct
  source 1..16: mol_type = other DNA
cagccgggaggtgcag

SEQ ID NO: 904 - DNA, 16 bp, synthetic construct
  source 1..16: mol_type = other DNA
atccagccgggaggtg

SEQ ID NO: 905 - DNA, 16 bp, synthetic construct
  source 1..16: mol_type = other DNA
cgcatccagccgggag

SEQ ID NO: 906 - DNA, 16 bp, synthetic construct
  source 1..16: mol_type = other DNA
gtgcgcatccagccgg

SEQ ID NO: 907 - DNA, 16 bp, synthetic construct
  source 1..16: mol_type = other DNA
cttgtgcgcatccagc

SEQ ID NO: 908 - DNA, 16 bp, synthetic construct
  source 1..16: mol_type = other DNA
gaccttgtgcgcatcc

SEQ ID NO: 909 - DNA, 16 bp, synthetic construct
  source 1..16: mol_type = other DNA
caggaccttgtgcgca

SEQ ID NO: 910 - DNA, 16 bp, synthetic construct
  source 1..16: mol_type = other DNA
agacaggaccttgtgc

SEQ ID NO: 911 - DNA, 16 bp, synthetic construct
  source 1..16: mol_type = other DNA
ggcagacaggaccttg

SEQ ID NO: 912 - DNA, 16 bp, synthetic construct
  source 1..16: mol_type = other DNA
gccctgtacagcctgc

SEQ ID NO: 913 - DNA, 16 bp, synthetic construct
  source 1..16: mol_type = other DNA
gcaggccctgtacagc

SEQ ID NO: 914 - DNA, 16 bp, synthetic construct
  source 1..16: mol_type = other DNA
ctagcaggccctgtac

SEQ ID NO: 915 - DNA, 16 bp, synthetic construct
  source 1..16: mol_type = other DNA
gccactagcaggccct

SEQ ID NO: 916 - DNA, 16 bp, synthetic construct
  source 1..16: mol_type = other DNA
tgggccactagcaggc

SEQ ID NO: 917 - DNA, 16 bp, synthetic construct
  source 1..16: mol_type = other DNA
ccctgggccactagca

SEQ ID NO: 918 - DNA, 16 bp, synthetic construct
  source 1..16: mol_type = other DNA
ctgccctgggccacta

SEQ ID NO: 919 - DNA, 16 bp, synthetic construct
  source 1..16: mol_type = other DNA
ggctatcagccctgcc

SEQ ID NO: 920 - DNA, 16 bp, synthetic construct
  source 1..16: mol_type = other DNA
cctggctatcagccct

SEQ ID NO: 921 - DNA, 16 bp, synthetic construct
  source 1..16: mol_type = other DNA
gggcctggctatcagc

SEQ ID NO: 922 - DNA, 16 bp, synthetic construct
  source 1..16: mol_type = other DNA
gctgggcctggctatc

SEQ ID NO: 923 - DNA, 16 bp, synthetic construct
  source 1..16: mol_type = other DNA
ccgtggacagcagcag

SEQ ID NO: 924 - DNA, 16 bp, synthetic construct
  source 1..16: mol_type = other DNA
ccaccgtggacagcag

SEQ ID NO: 925 - DNA, 16 bp, synthetic construct
  source 1..16: mol_type = other DNA
ccaccaccgtggacag

SEQ ID NO: 926 - DNA, 16 bp, synthetic construct
  source 1..16: mol_type = other DNA
cgcccaccaccgtgga

SEQ ID NO: 927 - DNA, 16 bp, synthetic construct
  source 1..16: mol_type = other DNA
acacgcccaccaccgt

SEQ ID NO: 928 - DNA, 16 bp, synthetic construct
  source 1..16: mol_type = other DNA
tgaacacgcccaccac

SEQ ID NO: 929 - DNA, 16 bp, synthetic construct
  source 1..16: mol_type = other DNA
ctgtgaacacgcccac

SEQ ID NO: 930 - DNA, 16 bp, synthetic construct
  source 1..16: mol_type = other DNA
gggctgtgaacacgcc

SEQ ID NO: 931 - DNA, 16 bp, synthetic construct
  source 1..16: mol_type = other DNA
gcttcaggtgcaggcc

SEQ ID NO: 932 - DNA, 16 bp, synthetic construct
  source 1..16: mol_type = other DNA
gctgcttcaggtgcag

SEQ ID NO: 933 - DNA, 16 bp, synthetic construct
  source 1..16: mol_type = other DNA
acggctgcttcaggtg

SEQ ID NO: 934 - DNA, 16 bp, synthetic construct
  source 1..16: mol_type = other DNA
caaacggctgcttcag

SEQ ID NO: 935 - DNA, 16 bp, synthetic construct
  source 1..16: mol_type = other DNA
gcacaaacggctgctt

SEQ ID NO: 936 - DNA, 16 bp, synthetic construct
  source 1..16: mol_type = other DNA
cctgcacaaacggctg

SEQ ID NO: 937 - DNA, 16 bp, synthetic construct
  source 1..16: mol_type = other DNA
ggccctgcacaaacgg

SEQ ID NO: 938 - DNA, 16 bp, synthetic construct
  source 1..16: mol_type = other DNA
gtatagagagccaggc

SEQ ID NO: 939 - DNA, 16 bp, synthetic construct
  source 1..16: mol_type = other DNA
ctgtgaagtccagaga

SEQ ID NO: 940 - DNA, 16 bp, synthetic construct
  source 1..16: mol_type = other DNA
gttctgtgaagtccag

SEQ ID NO: 941 - DNA, 16 bp, synthetic construct
  source 1..16: mol_type = other DNA
ccagttctgtgaagtc

SEQ ID NO: 942 - DNA, 16 bp, synthetic construct
  source 1..16: mol_type = other DNA
catccagttctgtgaa

SEQ ID NO: 943 - DNA, 16 bp, synthetic construct
  source 1..16: mol_type = other DNA
caacatccagttctgt

SEQ ID NO: 944 - DNA, 16 bp, synthetic construct
  source 1..16: mol_type = other DNA
cagcaacatccagttc

SEQ ID NO: 945 - DNA, 16 bp, synthetic construct
  source 1..16: mol_type = other DNA
caatcttctcagcagc

SEQ ID NO: 946 - DNA, 16 bp, synthetic construct
  source 1..16: mol_type = other DNA
tgtcaatcttctcagc

SEQ ID NO: 947 - DNA, 16 bp, synthetic construct
  source 1..16: mol_type = other DNA
acctgtcaatcttctc

SEQ ID NO: 948 - DNA, 16 bp, synthetic construct
  source 1..16: mol_type = other DNA
tgaacctgtcaatctt

SEQ ID NO: 949 - DNA, 16 bp, synthetic construct
  source 1..16: mol_type = other DNA
gcatgaacctgtcaat

SEQ ID NO: 950 - DNA, 16 bp, synthetic construct
  source 1..16: mol_type = other DNA
cctgcatgaacctgtc

SEQ ID NO: 951 - DNA, 16 bp, synthetic construct
  source 1..16: mol_type = other DNA
cagcctgcatgaacct

SEQ ID NO: 952 - DNA, 16 bp, synthetic construct
  source 1..16: mol_type = other DNA
cacagcctgcatgaac

SEQ ID NO: 953 - DNA, 16 bp, synthetic construct
  source 1..16: mol_type = other DNA
tcacagcctgcatgaa

SEQ ID NO: 954 - DNA, 16 bp, synthetic construct
  source 1..16: mol_type = other DNA
atcctgtcacagcctg

SEQ ID NO: 955 - DNA, 16 bp, synthetic construct
  source 1..16: mol_type = other DNA
ccatcctgtcacagcc

SEQ ID NO: 956 - DNA, 16 bp, synthetic construct
  source 1..16: mol_type = other DNA
tccatcctgtcacagc

SEQ ID NO: 957 - DNA, 16 bp, synthetic construct
  source 1..16: mol_type = other DNA
cttccatcctgtcaca

SEQ ID NO: 958 - DNA, 16 bp, synthetic construct
  source 1..16: mol_type = other DNA
agtcttccatcctgtc

SEQ ID NO: 959 - DNA, 16 bp, synthetic construct
  source 1..16: mol_type = other DNA
agccagtcttccatcc

SEQ ID NO: 960 - DNA, 16 bp, synthetic construct
  source 1..16: mol_type = other DNA
cacccagaactcctgg

SEQ ID NO: 961 - DNA, 16 bp, synthetic construct
  source 1..16: mol_type = other DNA
gtccacccagaactcc

SEQ ID NO: 962 - DNA, 16 bp, synthetic construct
  source 1..16: mol_type = other DNA
gttgtccacccagaac

SEQ ID NO: 963 - DNA, 16 bp, synthetic construct
  source 1..16: mol_type = other DNA
gctgttgtccacccag

SEQ ID NO: 964 - DNA, 16 bp, synthetic construct
  source 1..16: mol_type = other DNA
ggtgctgttgtccacc

SEQ ID NO: 965 - DNA, 16 bp, synthetic construct
  source 1..16: mol_type = other DNA
tgaggtgctgttgtcc

SEQ ID NO: 966 - DNA, 16 bp, synthetic construct
  source 1..16: mol_type = other DNA
cactgaggtgctgttg

SEQ ID NO: 967 - DNA, 16 bp, synthetic construct
  source 1..16: mol_type = other DNA
catgggaacagacact

SEQ ID NO: 968 - DNA, 16 bp, synthetic construct
  source 1..16: mol_type = other DNA
gagcatgggaacagac

SEQ ID NO: 969 - DNA, 16 bp, synthetic construct
  source 1..16: mol_type = other DNA
agagagcatgggaaca

SEQ ID NO: 970 - DNA, 16 bp, synthetic construct
  source 1..16: mol_type = other DNA
gccagagagcatggga

SEQ ID NO: 971 - DNA, 16 bp, synthetic construct
  source 1..16: mol_type = other DNA
catgccagagagcatg

SEQ ID NO: 972 - DNA, 16 bp, synthetic construct
  source 1..16: mol_type = other DNA
gcccatgccagagagc

SEQ ID NO: 973 - DNA, 16 bp, synthetic construct
  source 1..16: mol_type = other DNA
ggtgcccatgccagag

SEQ ID NO: 974 - DNA, 16 bp, synthetic construct
  source 1..16: mol_type = other DNA
gaaggtgcccatgcca

SEQ ID NO: 975 - DNA, 16 bp, synthetic construct
  source 1..16: mol_type = other DNA
ctggaaggtgcccatg

SEQ ID NO: 976 - DNA, 16 bp, synthetic construct
  source 1..16: mol_type = other DNA
agtgctggaaggtgcc

SEQ ID NO: 977 - DNA, 16 bp, synthetic construct
  source 1..16: mol_type = other DNA
tccagtgctggaaggt

SEQ ID NO: 978 - DNA, 16 bp, synthetic construct
  source 1..16: mol_type = other DNA
cactccagtgctggaa

SEQ ID NO: 979 - DNA, 16 bp, synthetic construct
  source 1..16: mol_type = other DNA
tgtcactccagtgctg

SEQ ID NO: 980 - DNA, 16 bp, synthetic construct
  source 1..16: mol_type = other DNA
atgtcactccagtgct

SEQ ID NO: 981 - DNA, 16 bp, synthetic construct
  source 1..16: mol_type = other DNA
gatgtcactccagtgc

SEQ ID NO: 982 - DNA, 16 bp, synthetic construct
  source 1..16: mol_type = other DNA
ggatgtcactccagtg

SEQ ID NO: 983 - DNA, 16 bp, synthetic construct
  source 1..16: mol_type = other DNA
tggatgtcactccagt

SEQ ID NO: 984 - DNA, 16 bp, synthetic construct
  source 1..16: mol_type = other DNA
cctggatgtcactcca

SEQ ID NO: 985 - DNA, 16 bp, synthetic construct
  source 1..16: mol_type = other DNA
tgtcctggatgtcact

SEQ ID NO: 986 - DNA, 16 bp, synthetic construct
  source 1..16: mol_type = other DNA
agttgtcctggatgtc

SEQ ID NO: 987 - DNA, 16 bp, synthetic construct
  source 1..16: mol_type = other DNA
agaagttgtcctggat

SEQ ID NO: 988 - DNA, 16 bp, synthetic construct
  source 1..16: mol_type = other DNA
tcaccgagaagttgtc

SEQ ID NO: 989 - DNA, 16 bp, synthetic construct
  source 1..16: mol_type = other DNA
gagtcaccgagaagtt

SEQ ID NO: 990 - DNA, 16 bp, synthetic construct
  source 1..16: mol_type = other DNA
cttgagtcaccgagaa

SEQ ID NO: 991 - DNA, 16 bp, synthetic construct
  source 1..16: mol_type = other DNA
gcacttgagtcaccga

SEQ ID NO: 992 - DNA, 16 bp, synthetic construct
  source 1..16: mol_type = other DNA
agggcacttgagtcac

SEQ ID NO: 993 - DNA, 16 bp, synthetic construct
  source 1..16: mol_type = other DNA
tgaagggcacttgagt

SEQ ID NO: 994 - DNA, 16 bp, synthetic construct
  source 1..16: mol_type = other DNA
cagtgaagggcacttg

SEQ ID NO: 995 - DNA, 16 bp, synthetic construct
  source 1..16: mol_type = other DNA
tctcagtgaagggcac

SEQ ID NO: 996 - DNA, 16 bp, synthetic construct
  source 1..16: mol_type = other DNA
cgctctcagtgaaggg

SEQ ID NO: 997 - DNA, 16 bp, synthetic construct
  source 1..16: mol_type = other DNA
agcagcaggcaggcgc

SEQ ID NO: 998 - DNA, 16 bp, synthetic construct
  source 1..16: mol_type = other DNA
gatcagcagcaggcag

SEQ ID NO: 999 - DNA, 16 bp, synthetic construct
  source 1..16: mol_type = other DNA
gctggatcagcagcag

SEQ ID NO: 1000 - DNA, 16 bp, synthetic construct
  source 1..16: mol_type = other DNA
gaggctggatcagcag

SEQ ID NO: 1001 - DNA, 16 bp, synthetic construct
  source 1..16: mol_type = other DNA
agtgaggctggatcag

SEQ ID NO: 1002 - DNA, 16 bp, synthetic construct
  source 1..16: mol_type = other DNA
catagtgaggctggat

SEQ ID NO: 1003 - DNA, 16 bp, synthetic construct
  source 1..16: mol_type = other DNA
aggcatagtgaggctg

SEQ ID NO: 1004 - DNA, 16 bp, synthetic construct
  source 1..16: mol_type = other DNA
agacacacaggccgcc

SEQ ID NO: 1005 - DNA, 16 bp, synthetic construct
  source 1..16: mol_type = other DNA
acactaactggagagc

SEQ ID NO: 1006 - DNA, 16 bp, synthetic construct
  source 1..16: mol_type = other DNA
agagggcggattgcaa

SEQ ID NO: 1007 - DNA, 16 bp, synthetic construct
  source 1..16: mol_type = other DNA
cagagggcggattgca

SEQ ID NO: 1008 - DNA, 16 bp, synthetic construct
  source 1..16: mol_type = other DNA
tctcagagggcggatt

SEQ ID NO: 1009 - DNA, 16 bp, synthetic construct
  source 1..16: mol_type = other DNA
ctctcagagggcggat

SEQ ID NO: 1010 - DNA, 16 bp, synthetic construct
  source 1..16: mol_type = other DNA
tctctcagagggcgga

SEQ ID NO: 1011 - DNA, 16 bp, synthetic construct
  source 1..16: mol_type = other DNA
gctgtgtgtcaggtgt

SEQ ID NO: 1012 - DNA, 16 bp, synthetic construct
  source 1..16: mol_type = other DNA
aagaagctcttggatg

SEQ ID NO: 1013 - DNA, 16 bp, synthetic construct
  source 1..16: mol_type = other DNA
tccaagaagctcttgg

SEQ ID NO: 1014 - DNA, 16 bp, synthetic construct
  source 1..16: mol_type = other DNA
ccagccgccagccgcc

SEQ ID NO: 1015 - DNA, 16 bp, synthetic construct
  source 1..16: mol_type = other DNA
ttagtgtttcagcagg

SEQ ID NO: 1016 - DNA, 16 bp, synthetic construct
  source 1..16: mol_type = other DNA
agttagtgtttcagca

SEQ ID NO: 1017 - DNA, 16 bp, synthetic construct
  source 1..16: mol_type = other DNA
aacctcgaggacatcg

SEQ ID NO: 1018 - DNA, 16 bp, synthetic construct
  source 1..16: mol_type = other DNA
acttataagagctgac

SEQ ID NO: 1019 - DNA, 16 bp, synthetic construct
  source 1..16: mol_type = other DNA
agcacttataagagct

SEQ ID NO: 1020 - DNA, 16 bp, synthetic construct
  source 1..16: mol_type = other DNA
gcagtgttcttgatga

SEQ ID NO: 1021 - DNA, 16 bp, synthetic construct
  source 1..16: mol_type = other DNA
acagcagtgttcttga

SEQ ID NO: 1022 - DNA, 16 bp, synthetic construct
  source 1..16: mol_type = other DNA
ataatgcactgtgtct

SEQ ID NO: 1023 - DNA, 16 bp, synthetic construct
  source 1..16: mol_type = other DNA
gatgaggacctaggaa

SEQ ID NO: 1024 - DNA, 16 bp, synthetic construct
  source 1..16: mol_type = other DNA
ccgatgaggacctagg

SEQ ID NO: 1025 - DNA, 16 bp, synthetic construct
  source 1..16: mol_type = other DNA
acgacagggatgtttg

SEQ ID NO: 1026 - DNA, 16 bp, synthetic construct
  source 1..16: mol_type = other DNA
ggtcaggcacagacac

SEQ ID NO: 1027 - DNA, 16 bp, synthetic construct
  source 1..16: mol_type = other DNA
atcccggtttcaactc

SEQ ID NO: 1028 - DNA, 16 bp, synthetic construct
  source 1..16: mol_type = other DNA
tcccgctggcccccgt

SEQ ID NO: 1029 - DNA, 16 bp, synthetic construct
  source 1..16: mol_type = other DNA
ctaacttagcacagag

SEQ ID NO: 1030 - DNA, 16 bp, synthetic construct
  source 1..16: mol_type = other DNA
ccatggcccaccagtg

SEQ ID NO: 1031 - DNA, 16 bp, synthetic construct
  source 1..16: mol_type = other DNA
ttggccatggcccacc

SEQ ID NO: 1032 - DNA, 16 bp, synthetic construct
  source 1..16: mol_type = other DNA
ggcagaattcctggct

SEQ ID NO: 1033 - DNA, 16 bp, synthetic construct
  source 1..16: mol_type = other DNA
gcaagggtgtgtctgt

SEQ ID NO: 1034 - DNA, 16 bp, synthetic construct
  source 1..16: mol_type = other DNA
ggcaagggtgtgtctg

SEQ ID NO: 1035 - DNA, 16 bp, synthetic construct
  source 1..16: mol_type = other DNA
ctcagtgtaggcaagg

SEQ ID NO: 1036 - DNA, 16 bp, synthetic construct
  source 1..16: mol_type = other DNA
gaggatgcacagtgta

SEQ ID NO: 1037 - DNA, 16 bp, synthetic construct
  source 1..16: mol_type = other DNA
gctcaggacctctgtg

SEQ ID NO: 1038 - DNA, 16 bp, synthetic construct
  source 1..16: mol_type = other DNA
ggctcaggacctctgt

SEQ ID NO: 1039 - DNA, 16 bp, synthetic construct
  source 1..16: mol_type = other DNA
ggcgcactgggtgacc

SEQ ID NO: 1040 - DNA, 16 bp, synthetic construct
  source 1..16: mol_type = other DNA
tctgagggcgcactgg

SEQ ID NO: 1041 - DNA, 16 bp, synthetic construct
  source 1..16: mol_type = other DNA
tcattctgagggcgca

SEQ ID NO: 1042 - DNA, 16 bp, synthetic construct
  source 1..16: mol_type = other DNA
gctcctaccggggaga

SEQ ID NO: 1043 - DNA, 16 bp, synthetic construct
  source 1..16: mol_type = other DNA
acacatacctccccca

SEQ ID NO: 1044 - DNA, 16 bp, synthetic construct
  source 1..16: mol_type = other DNA
cgcataccctgaaata

SEQ ID NO: 1045 - DNA, 16 bp, synthetic construct
  source 1..16: mol_type = other DNA
ggatggtcctggggag

SEQ ID NO: 1046 - DNA, 16 bp, synthetic construct
  source 1..16: mol_type = other DNA
ttcagcacctgcaaag

SEQ ID NO: 1047 - DNA, 16 bp, synthetic construct
  source 1..16: mol_type = other DNA
ccggcttaccttctgc

SEQ ID NO: 1048 - DNA, 16 bp, synthetic construct
  source 1..16: mol_type = other DNA
cccccggcttaccttc

SEQ ID NO: 1049 - DNA, 16 bp, synthetic construct
  source 1..16: mol_type = other DNA
gggcccccggcttacc

SEQ ID NO: 1050 - DNA, 16 bp, synthetic construct
  source 1..16: mol_type = other DNA
gtgaatgtgagccccg

SEQ ID NO: 1051 - DNA, 16 bp, synthetic construct
  source 1..16: mol_type = other DNA
tccctccttataaccc

SEQ ID NO: 1052 - DNA, 16 bp, synthetic construct
  source 1..16: mol_type = other DNA
ccgggcactctcaact

SEQ ID NO: 1053 - DNA, 16 bp, synthetic construct
  source 1..16: mol_type = other DNA
agtaatggtgctctgg

SEQ ID NO: 1054 - DNA, 16 bp, synthetic construct
  source 1..16: mol_type = other DNA
tcctgggagtaatggt

SEQ ID NO: 1055 - DNA, 16 bp, synthetic construct
  source 1..16: mol_type = other DNA
tctcagttgtgatctg

SEQ ID NO: 1056 - DNA, 16 bp, synthetic construct
  source 1..16: mol_type = other DNA
tccagagacgcaattc

SEQ ID NO: 1057 - DNA, 16 bp, synthetic construct
  source 1..16: mol_type = other DNA
tctccagagacgcaat

SEQ ID NO: 1058 - DNA, 16 bp, synthetic construct
  source 1..16: mol_type = other DNA
acctgtgggaaccgac

SEQ ID NO: 1059 - DNA, 16 bp, synthetic construct
  source 1..16: mol_type = other DNA
aaacctgtgggaaccg

SEQ ID NO: 1060 - DNA, 16 bp, synthetic construct
  source 1..16: mol_type = other DNA
cctagatttttctgct

SEQ ID NO: 1061 - DNA, 16 bp, synthetic construct
  source 1..16: mol_type = other DNA
gccttttctgtccccc

SEQ ID NO: 1062 - DNA, 16 bp, synthetic construct
  source 1..16: mol_type = other DNA
catttcttgtggaggg

SEQ ID NO: 1063 - DNA, 16 bp, synthetic construct
  source 1..16: mol_type = other DNA
tgggctggccctgcta

SEQ ID NO: 1064 - DNA, 16 bp, synthetic construct
  source 1..16: mol_type = other DNA
gagccccaaaggcatg

SEQ ID NO: 1065 - DNA, 16 bp, synthetic construct
  source 1..16: mol_type = other DNA
tctaatatgacctgtg

SEQ ID NO: 1066 - DNA, 16 bp, synthetic construct
  source 1..16: mol_type = other DNA
tgatctaatatgacct

SEQ ID NO: 1067 - DNA, 16 bp, synthetic construct
  source 1..16: mol_type = other DNA
gtcctcaaccccagga

SEQ ID NO: 1068 - DNA, 16 bp, synthetic construct
  source 1..16: mol_type = other DNA
gctccatggaaaatat

SEQ ID NO: 1069 - DNA, 16 bp, synthetic construct
  source 1..16: mol_type = other DNA
tccattcatgtctaca

SEQ ID NO: 1070 - DNA, 16 bp, synthetic construct
  source 1..16: mol_type = other DNA
ttaagtgccatctaac

SEQ ID NO: 1071 - DNA, 16 bp, synthetic construct
  source 1..16: mol_type = other DNA
gcataccctgaaatat

SEQ ID NO: 1072 - DNA, 16 bp, synthetic construct
  source 1..16: mol_type = other DNA
tgtctactccccaccc

SEQ ID NO: 1073 - DNA, 16 bp, synthetic construct
  source 1..16: mol_type = other DNA
acagacactaactgga

SEQ ID NO: 1074 - DNA, 16 bp, synthetic construct
  source 1..16: mol_type = other DNA
gtgtgtcaggtgtggg

SEQ ID NO: 1075 - DNA, 16 bp, synthetic construct
  source 1..16: mol_type = other DNA
gcaagtcagttccaag

SEQ ID NO: 1076 - DNA, 16 bp, synthetic construct
  source 1..16: mol_type = other DNA
ctcgaaaatggttacg

SEQ ID NO: 1077 - DNA, 16 bp, synthetic construct
  source 1..16: mol_type = other DNA
ggtggtaaccacatgc

SEQ ID NO: 1078 - DNA, 16 bp, synthetic construct
  source 1..16: mol_type = other DNA
atgcactgtgtcttac

SEQ ID NO: 1079 - DNA, 16 bp, synthetic construct
  source 1..16: mol_type = other DNA
aataatgcactgtgtc

SEQ ID NO: 1080 - DNA, 16 bp, synthetic construct
  source 1..16: mol_type = other DNA
gttacttgggtaattt

SEQ ID NO: 1081 - DNA, 16 bp, synthetic construct
  source 1..16: mol_type = other DNA
tcctttggtgcattct

SEQ ID NO: 1082 - DNA, 16 bp, synthetic construct
  source 1..16: mol_type = other DNA
ctaggaatggttgtcc

SEQ ID NO: 1083 - DNA, 16 bp, synthetic construct
  source 1..16: mol_type = other DNA
gacgacagggatgttt

SEQ ID NO: 1084 - DNA, 16 bp, synthetic construct
  source 1..16: mol_type = other DNA
ctgacgacagggatgt

SEQ ID NO: 1085 - DNA, 16 bp, synthetic construct
  source 1..16: mol_type = other DNA
gcacagttaggaaggc

SEQ ID NO: 1086 - DNA, 16 bp, synthetic construct
  source 1..16: mol_type = other DNA
ttagctaacttagcac

SEQ ID NO: 1087 - DNA, 16 bp, synthetic construct
  source 1..16: mol_type = other DNA
catggcccaccagtgc

SEQ ID NO: 1088 - DNA, 16 bp, synthetic construct
  source 1..16: mol_type = other DNA
cacagtgtatgcctgc

SEQ ID NO: 1089 - DNA, 16 bp, synthetic construct
  source 1..16: mol_type = other DNA
gcactgggtgacccag

SEQ ID NO: 1090 - DNA, 16 bp, synthetic construct
  source 1..16: mol_type = other DNA
tcagcacctgcaaagc

SEQ ID NO: 1091 - DNA, 16 bp, synthetic construct
  source 1..16: mol_type = other DNA
gagcagccagtcttcc

SEQ ID NO: 1092 - DNA, 16 bp, synthetic construct
  source 1..16: mol_type = other DNA
agggagcagccagtct

SEQ ID NO: 1093 - DNA, 16 bp, synthetic construct
  source 1..16: mol_type = other DNA
atcagggagcagccag

SEQ ID NO: 1094 - DNA, 16 bp, synthetic construct
  source 1..16: mol_type = other DNA
tcccatcagggagcag

SEQ ID NO: 1095 - DNA, 16 bp, synthetic construct
  source 1..16: mol_type = other DNA
ggctcccatcagggag

SEQ ID NO: 1096 - DNA, 16 bp, synthetic construct
  source 1..16: mol_type = other DNA
actggctcccatcagg

SEQ ID NO: 1097 - DNA, 16 bp, synthetic construct
  source 1..16: mol_type = other DNA
ccacactggctcccat

SEQ ID NO: 1098 - DNA, 16 bp, synthetic construct
  source 1..16: mol_type = other DNA
gctgtccacactggct

SEQ ID NO: 1099 - DNA, 16 bp, synthetic construct
  source 1..16: mol_type = other DNA
ggtgctgtccacactg

SEQ ID NO: 1100 - DNA, 16 bp, synthetic construct
  source 1..16: mol_type = other DNA
cagggtgctgtccaca

SEQ ID NO: 1101 - DNA, 16 bp, synthetic construct
  source 1..16: mol_type = other DNA
agccagggtgctgtcc

SEQ ID NO: 1102 - DNA, 16 bp, synthetic construct
  source 1..16: mol_type = other DNA
gaaagccagggtgctg

SEQ ID NO: 1103 - DNA, 16 bp, synthetic construct
  source 1..16: mol_type = other DNA
gttgaaagccagggtg

SEQ ID NO: 1104 - DNA, 16 bp, synthetic construct
  source 1..16: mol_type = other DNA
ggtgttgaaagccagg

SEQ ID NO: 1105 - DNA, 16 bp, synthetic construct
  source 1..16: mol_type = other DNA
gtaggtgttgaaagcc

SEQ ID NO: 1106 - DNA, 16 bp, synthetic construct
  source 1..16: mol_type = other DNA
cccttggaagtggacg

SEQ ID NO: 1107 - DNA, 16 bp, synthetic construct
  source 1..16: mol_type = other DNA
cttcccttggaagtgg

SEQ ID NO: 1108 - DNA, 16 bp, synthetic construct
  source 1..16: mol_type = other DNA
catcttcccttggaag

SEQ ID NO: 1109 - DNA, 16 bp, synthetic construct
  source 1..16: mol_type = other DNA
cttcatcttcccttgg

SEQ ID NO: 1110 - DNA, 16 bp, synthetic construct
  source 1..16: mol_type = other DNA
agcccttcatcttccc

SEQ ID NO: 1111 - DNA, 16 bp, synthetic construct
  source 1..16: mol_type = other DNA
agaagcccttcatctt

SEQ ID NO: 1112 - DNA, 16 bp, synthetic construct
  source 1..16: mol_type = other DNA
gggagaagcccttcat

SEQ ID NO: 1113 - DNA, 16 bp, synthetic construct
  source 1..16: mol_type = other DNA
gcagggagaagccctt

SEQ ID NO: 1114 - DNA, 16 bp, synthetic construct
  source 1..16: mol_type = other DNA
tcggccagcagggaga

SEQ ID NO: 1115 - DNA, 16 bp, synthetic construct
  source 1..16: mol_type = other DNA
ggctcggccagcaggg

SEQ ID NO: 1116 - DNA, 16 bp, synthetic construct
  source 1..16: mol_type = other DNA
cgaagggagacccatt

SEQ ID NO: 1117 - DNA, 16 bp, synthetic construct
  source 1..16: mol_type = other DNA
ttcgaagggagaccca

SEQ ID NO: 1118 - DNA, 16 bp, synthetic construct
  source 1..16: mol_type = other DNA
ctttcgaagggagacc

SEQ ID NO: 1119 - DNA, 16 bp, synthetic construct
  source 1..16: mol_type = other DNA
ccgatctcctcactgg

SEQ ID NO: 1120 - DNA, 16 bp, synthetic construct
  source 1..16: mol_type = other DNA
ccccgatctcctcact

SEQ ID NO: 1121 - DNA, 16 bp, synthetic construct
  source 1..16: mol_type = other DNA
acagcccccgatctcc

SEQ ID NO: 1122 - DNA, 16 bp, synthetic construct
  source 1..16: mol_type = other DNA
gagacagcccccgatc

SEQ ID NO: 1123 - DNA, 16 bp, synthetic construct
  source 1..16: mol_type = other DNA
ccgagacagcccccga

SEQ ID NO: 1124 - DNA, 16 bp, synthetic construct
  source 1..16: mol_type = other DNA
ctagctgcctgctgag

SEQ ID NO: 1125 - DNA, 16 bp, synthetic construct
  source 1..16: mol_type = other DNA
tctagctgcctgctga

SEQ ID NO: 1126 - DNA, 16 bp, synthetic construct
  source 1..16: mol_type = other DNA
gtgggacacatctagc

SEQ ID NO: 1127 - DNA, 16 bp, synthetic construct
  source 1..16: mol_type = other DNA
tctagtgggacacatc

SEQ ID NO: 1128 - DNA, 16 bp, synthetic construct
  source 1..16: mol_type = other DNA
tctctagtgggacaca

SEQ ID NO: 1129 - DNA, 16 bp, synthetic construct
  source 1..16: mol_type = other DNA
catgagagtggctgcc

SEQ ID NO: 1130 - DNA, 16 bp, synthetic construct
  source 1..16: mol_type = other DNA
cttttagtttagaggg

SEQ ID NO: 1131 - DNA, 16 bp, synthetic construct
  source 1..16: mol_type = other DNA
atgtgagcgggaaact

SEQ ID NO: 1132 - DNA, 16 bp, synthetic construct
  source 1..16: mol_type = other DNA
catgtgagcgggaaac

SEQ ID NO: 1133 - DNA, 16 bp, synthetic construct
  source 1..16: mol_type = other DNA
cggagcactcagtctc

SEQ ID NO: 1134 - DNA, 16 bp, synthetic construct
  source 1..16: mol_type = other DNA
gtcctcagtcctcgga

SEQ ID NO: 1135 - DNA, 16 bp, synthetic construct
  source 1..16: mol_type = other DNA
cgtcctcagtcctcgg

SEQ ID NO: 1136 - DNA, 16 bp, synthetic construct
  source 1..16: mol_type = other DNA
gcagtggcagacctgg

SEQ ID NO: 1137 - DNA, 16 bp, synthetic construct
  source 1..16: mol_type = other DNA
tagagatggttcagaa

SEQ ID NO: 1138 - DNA, 16 bp, synthetic construct
  source 1..16: mol_type = other DNA
tgagtagagatggttc

SEQ ID NO: 1139 - DNA, 16 bp, synthetic construct
  source 1..16: mol_type = other DNA
ggagtctgagtagaga

SEQ ID NO: 1140 - DNA, 16 bp, synthetic construct
  source 1..16: mol_type = other DNA
gccctcggctgtcctc

SEQ ID NO: 1141 - DNA, 16 bp, synthetic construct
  source 1..16: mol_type = other DNA
ctcgaccttacactag

SEQ ID NO: 1142 - DNA, 16 bp, synthetic construct
  source 1..16: mol_type = other DNA
cctctgcctcgacctt

SEQ ID NO: 1143 - DNA, 16 bp, synthetic construct
  source 1..16: mol_type = other DNA
aactcgggagagcccg

SEQ ID NO: 1144 - DNA, 16 bp, synthetic construct
  source 1..16: mol_type = other DNA
aacgagggctccattc

SEQ ID NO: 1145 - DNA, 16 bp, synthetic construct
  source 1..16: mol_type = other DNA
gacacactcacttttt

SEQ ID NO: 1146 - DNA, 16 bp, synthetic construct
  source 1..16: mol_type = other DNA
ctgccaggtcaactca

SEQ ID NO: 1147 - DNA, 16 bp, synthetic construct
  source 1..16: mol_type = other DNA
gtacctgccaggtcaa

SEQ ID NO: 1148 - DNA, 16 bp, synthetic construct
  source 1..16: mol_type = other DNA
ctggtacctgccaggt

SEQ ID NO: 1149 - DNA, 16 bp, synthetic construct
  source 1..16: mol_type = other DNA
agttcactgaggcagc

SEQ ID NO: 1150 - DNA, 16 bp, synthetic construct
  source 1..16: mol_type = other DNA
ccatttgagttcactg

SEQ ID NO: 1151 - DNA, 16 bp, synthetic construct
  source 1..16: mol_type = other DNA
gcagccatttgagttc

SEQ ID NO: 1152 - DNA, 16 bp, synthetic construct
  source 1..16: mol_type = other DNA
aaggcccagatcctgc

SEQ ID NO: 1153 - DNA, 16 bp, synthetic construct
  source 1..16: mol_type = other DNA
gaaatccagacaggag

SEQ ID NO: 1154 - DNA, 16 bp, synthetic construct
  source 1..16: mol_type = other DNA
tgccttaccttggaag

SEQ ID NO: 1155 - DNA, 16 bp, synthetic construct
  source 1..16: mol_type = other DNA
catcttccctgaaatc

SEQ ID NO: 1156 - DNA, 16 bp, synthetic construct
  source 1..16: mol_type = other DNA
aggtatgtccgcaggg

SEQ ID NO: 1157 - DNA, 16 bp, synthetic construct
  source 1..16: mol_type = other DNA
tagtagggcagcaggt

SEQ ID NO: 1158 - DNA, 16 bp, synthetic construct
  source 1..16: mol_type = other DNA
ttgtttctccgagtct

SEQ ID NO: 1159 - DNA, 16 bp, synthetic construct
  source 1..16: mol_type = other DNA
aggcactttgtttctc

SEQ ID NO: 1160 - DNA, 16 bp, synthetic construct
  source 1..16: mol_type = other DNA
caaggcactttgtttc

SEQ ID NO: 1161 - DNA, 16 bp, synthetic construct
  source 1..16: mol_type = other DNA
tagaactgggctgtgg

SEQ ID NO: 1162 - DNA, 16 bp, synthetic construct
  source 1..16: mol_type = other DNA
ccctcctaacatgaaa

SEQ ID NO: 1163 - DNA, 16 bp, synthetic construct
  source 1..16: mol_type = other DNA
cttacaagtagcaaat

SEQ ID NO: 1164 - DNA, 16 bp, synthetic construct
  source 1..16: mol_type = other DNA
gccaggcttaaagtct

SEQ ID NO: 1165 - DNA, 16 bp, synthetic construct
  source 1..16: mol_type = other DNA
attgacctttaaaagc

SEQ ID NO: 1166 - DNA, 16 bp, synthetic construct
  source 1..16: mol_type = other DNA
tctggttcaacactca

SEQ ID NO: 1167 - DNA, 16 bp, synthetic construct
  source 1..16: mol_type = other DNA
ttcccgtgactgtgtg

SEQ ID NO: 1168 - DNA, 16 bp, synthetic construct
  source 1..16: mol_type = other DNA
cgagctgctccctgag

SEQ ID NO: 1169 - DNA, 16 bp, synthetic construct
  source 1..16: mol_type = other DNA
caccccacccatggat

SEQ ID NO: 1170 - DNA, 16 bp, synthetic construct
  source 1..16: mol_type = other DNA
tctctgtccctcacga

SEQ ID NO: 1171 - DNA, 16 bp, synthetic construct
  source 1..16: mol_type = other DNA
tttcgaagggagaccc

SEQ ID NO: 1172 - DNA, 16 bp, synthetic construct
  source 1..16: mol_type = other DNA
catctagctgcctgct

SEQ ID NO: 1173 - DNA, 16 bp, synthetic construct
  source 1..16: mol_type = other DNA
tgggacacatctagct

SEQ ID NO: 1174 - DNA, 16 bp, synthetic construct
  source 1..16: mol_type = other DNA
atcctcaggtcctctc

SEQ ID NO: 1175 - DNA, 16 bp, synthetic construct
  source 1..16: mol_type = other DNA
atggttcagaaacagt

SEQ ID NO: 1176 - DNA, 16 bp, synthetic construct
  source 1..16: mol_type = other DNA
gatttgcacactgggc

SEQ ID NO: 1177 - DNA, 16 bp, synthetic construct
  source 1..16: mol_type = other DNA
ccccgtgatcaacatc

SEQ ID NO: 1178 - DNA, 16 bp, synthetic construct
  source 1..16: mol_type = other DNA
atcgagcagaaagtac

SEQ ID NO: 1179 - DNA, 16 bp, synthetic construct
  source 1..16: mol_type = other DNA
actggtacctgccagg

SEQ ID NO: 1180 - DNA, 20 bp, synthetic construct
  source 1..20: mol_type = other DNA
ctgctgcccgctcatgggat

SEQ ID NO: 1181 - DNA, 20 bp, synthetic construct
  source 1..20: mol_type = other DNA
ctgaccctgctgcccgctca

SEQ ID NO: 1182 - DNA, 20 bp, synthetic construct
  source 1..20: mol_type = other DNA
ccacttctgaccctgctgcc

SEQ ID NO: 1183 - DNA, 20 bp, synthetic construct
  source 1..20: mol_type = other DNA
tcttgcttaggcaacacggg

SEQ ID NO: 1184 - DNA, 20 bp, synthetic construct
  source 1..20: mol_type = other DNA
ggagagtcttgcttaggcaa

SEQ ID NO: 1185 - DNA, 20 bp, synthetic construct
  source 1..20: mol_type = other DNA
ggaggtgcagagggcagagg

SEQ ID NO: 1186 - DNA, 20 bp, synthetic construct
  source 1..20: mol_type = other DNA
caggccggaggtgcagaggg

SEQ ID NO: 1187 - DNA, 20 bp, synthetic construct
  source 1..20: mol_type = other DNA
gacatgcaggccggaggtgc

SEQ ID NO: 1188 - DNA, 20 bp, synthetic construct
  source 1..20: mol_type = other DNA
cacagggacatgcaggccgg

SEQ ID NO: 1189 - DNA, 20 bp, synthetic construct
  source 1..20: mol_type = other DNA
agaggccacagggacatgca

SEQ ID NO: 1190 - DNA, 20 bp, synthetic construct
  source 1..20: mol_type = other DNA
cccccaagaggccacaggga

SEQ ID NO: 1191 - DNA, 20 bp, synthetic construct
  source 1..20: mol_type = other DNA
gatgtacccccaagaggcca

SEQ ID NO: 1192 - DNA, 20 bp, synthetic construct
  source 1..20: mol_type = other DNA
ccgggagatgtacccccaag

SEQ ID NO: 1193 - DNA, 20 bp, synthetic construct
  source 1..20: mol_type = other DNA
ccagccccgggagatgtacc

SEQ ID NO: 1194 - DNA, 20 bp, synthetic construct
  source 1..20: mol_type = other DNA
tctgacccagccccgggaga

SEQ ID NO: 1195 - DNA, 20 bp, synthetic construct
  source 1..20: mol_type = other DNA
aggccttctgacccagcccc

SEQ ID NO: 1196 - DNA, 20 bp, synthetic construct
  source 1..20: mol_type = other DNA
ccacccaggccttctgaccc

SEQ ID NO: 1197 - DNA, 20 bp, synthetic construct
  source 1..20: mol_type = other DNA
ggccaaccacccaggccttc

SEQ ID NO: 1198 - DNA, 20 bp, synthetic construct
  source 1..20: mol_type = other DNA
gcctgaggccaaccacccag

SEQ ID NO: 1199 - DNA, 20 bp, synthetic construct
  source 1..20: mol_type = other DNA
gtgacagcctgaggccaacc

SEQ ID NO: 1200 - DNA, 20 bp, synthetic construct
  source 1..20: mol_type = other DNA
aggtgtgtgacagcctgagg

SEQ ID NO: 1201 - DNA, 20 bp, synthetic construct
  source 1..20: mol_type = other DNA
ctccctaggtgtgtgacagc

SEQ ID NO: 1202 - DNA, 20 bp, synthetic construct
  source 1..20: mol_type = other DNA
gagcatctccctaggtgtgt

SEQ ID NO: 1203 - DNA, 20 bp, synthetic construct
  source 1..20: mol_type = other DNA
aaacgggagcatctccctag

SEQ ID NO: 1204 - DNA, 20 bp, synthetic construct
  source 1..20: mol_type = other DNA
tcccagaaacgggagcatct

SEQ ID NO: 1205 - DNA, 20 bp, synthetic construct
  source 1..20: mol_type = other DNA
caaggttcccagaaacggga

SEQ ID NO: 1206 - DNA, 20 bp, synthetic construct
  source 1..20: mol_type = other DNA
cgaagtttgcaggagtcggg

SEQ ID NO: 1207 - DNA, 20 bp, synthetic construct
  source 1..20: mol_type = other DNA
atttaccgaagtttgcagga

SEQ ID NO: 1208 - DNA, 20 bp, synthetic construct
  source 1..20: mol_type = other DNA
ttacacatttaccgaagttt

SEQ ID NO: 1209 - DNA, 20 bp, synthetic construct
  source 1..20: mol_type = other DNA
gtcgagttacacatttaccg

SEQ ID NO: 1210 - DNA, 20 bp, synthetic construct
  source 1..20: mol_type = other DNA
tgcagggtcgagttacacat

SEQ ID NO: 1211 - DNA, 20 bp, synthetic construct
  source 1..20: mol_type = other DNA
agccggtgcagggtcgagtt

SEQ ID NO: 1212 - DNA, 20 bp, synthetic construct
  source 1..20: mol_type = other DNA
agagtgagccggtgcagggt

SEQ ID NO: 1213 - DNA, 20 bp, synthetic construct
  source 1..20: mol_type = other DNA
ctgaacagagtgagccggtg

SEQ ID NO: 1214 - DNA, 20 bp, synthetic construct
  source 1..20: mol_type = other DNA
tcactgctgaacagagtgag

SEQ ID NO: 1215 - DNA, 20 bp, synthetic construct
  source 1..20: mol_type = other DNA
agagtttcactgctgaacag

SEQ ID NO: 1216 - DNA, 20 bp, synthetic construct
  source 1..20: mol_type = other DNA
cgatgcagagtttcactgct

SEQ ID NO: 1217 - DNA, 20 bp, synthetic construct
  source 1..20: mol_type = other DNA
agtgatcgatgcagagtttc

SEQ ID NO: 1218 - DNA, 20 bp, synthetic construct
  source 1..20: mol_type = other DNA
agtcttagtgatcgatgcag

SEQ ID NO: 1219 - DNA, 20 bp, synthetic construct
  source 1..20: mol_type = other DNA
ccaggaagtcttagtgatcg

SEQ ID NO: 1220 - DNA, 20 bp, synthetic construct
  source 1..20: mol_type = other DNA
cctcttccaggaagtcttag

SEQ ID NO: 1221 - DNA, 20 bp, synthetic construct
  source 1..20: mol_type = other DNA
ctgggacctcttccaggaag

SEQ ID NO: 1222 - DNA, 20 bp, synthetic construct
  source 1..20: mol_type = other DNA
ctcacgctgggacctcttcc

SEQ ID NO: 1223 - DNA, 20 bp, synthetic construct
  source 1..20: mol_type = other DNA
gcgacactcacgctgggacc

SEQ ID NO: 1224 - DNA, 20 bp, synthetic construct
  source 1..20: mol_type = other DNA
ccagaagcgacactcacgct

SEQ ID NO: 1225 - DNA, 20 bp, synthetic construct
  source 1..20: mol_type = other DNA
cagatgccagaagcgacact

SEQ ID NO: 1226 - DNA, 20 bp, synthetic construct
  source 1..20: mol_type = other DNA
gaaggacagatgccagaagc

SEQ ID NO: 1227 - DNA, 20 bp, synthetic construct
  source 1..20: mol_type = other DNA
tggccagaaggacagatgcc

SEQ ID NO: 1228 - DNA, 20 bp, synthetic construct
  source 1..20: mol_type = other DNA
acaggctggccagaaggaca

SEQ ID NO: 1229 - DNA, 20 bp, synthetic construct
  source 1..20: mol_type = other DNA
cagaccacaggctggccaga

SEQ ID NO: 1230 - DNA, 20 bp, synthetic construct
  source 1..20: mol_type = other DNA
cttggccagaccacaggctg

SEQ ID NO: 1231 - DNA, 20 bp, synthetic construct
  source 1..20: mol_type = other DNA
acatcacttggccagaccac

SEQ ID NO: 1232 - DNA, 20 bp, synthetic construct
  source 1..20: mol_type = other DNA
agggttacatcacttggcca

SEQ ID NO: 1233 - DNA, 20 bp, synthetic construct
  source 1..20: mol_type = other DNA
gagaggagggttacatcact

SEQ ID NO: 1234 - DNA, 20 bp, synthetic construct
  source 1..20: mol_type = other DNA
aggctggagaggagggttac

SEQ ID NO: 1235 - DNA, 20 bp, synthetic construct
  source 1..20: mol_type = other DNA
gtgcacaggctggagaggag

SEQ ID NO: 1236 - DNA, 20 bp, synthetic construct
  source 1..20: mol_type = other DNA
ctgcctgtgcacaggctgga

SEQ ID NO: 1237 - DNA, 20 bp, synthetic construct
  source 1..20: mol_type = other DNA
cccaggctgcctgtgcacag

SEQ ID NO: 1238 - DNA, 20 bp, synthetic construct
  source 1..20: mol_type = other DNA
gctgttcccaggctgcctgt

SEQ ID NO: 1239 - DNA, 20 bp, synthetic construct
  source 1..20: mol_type = other DNA
gatggagctgttcccaggct

SEQ ID NO: 1240 - DNA, 20 bp, synthetic construct
  source 1..20: mol_type = other DNA
gccctatttatagctgaggg

SEQ ID NO: 1241 - DNA, 20 bp, synthetic construct
  source 1..20: mol_type = other DNA
cacgatgccctatttatagc

SEQ ID NO: 1242 - DNA, 20 bp, synthetic construct
  source 1..20: mol_type = other DNA
ccgggtcacgatgccctatt

SEQ ID NO: 1243 - DNA, 20 bp, synthetic construct
  source 1..20: mol_type = other DNA
ccccggccgggtcacgatgc

SEQ ID NO: 1244 - DNA, 20 bp, synthetic construct
  source 1..20: mol_type = other DNA
ttcccccggccgggtcacga

SEQ ID NO: 1245 - DNA, 20 bp, synthetic construct
  source 1..20: mol_type = other DNA
ttcttcccccggccgggtca

SEQ ID NO: 1246 - DNA, 20 bp, synthetic construct
  source 1..20: mol_type = other DNA
agcttcttcccccggccggg

SEQ ID NO: 1247 - DNA, 20 bp, synthetic construct
  source 1..20: mol_type = other DNA
ggcagcttcttcccccggcc

SEQ ID NO: 1248 - DNA, 20 bp, synthetic construct
  source 1..20: mol_type = other DNA
aacggcagcttcttcccccg

SEQ ID NO: 1249 - DNA, 20 bp, synthetic construct
  source 1..20: mol_type = other DNA
aacaacggcagcttcttccc

SEQ ID NO: 1250 - DNA, 20 bp, synthetic construct
  source 1..20: mol_type = other DNA
cagaacaacggcagcttctt

SEQ ID NO: 1251 - DNA, 20 bp, synthetic construct
  source 1..20: mol_type = other DNA
acccagaacaacggcagctt

SEQ ID NO: 1252 - DNA, 20 bp, synthetic construct
  source 1..20: mol_type = other DNA
agtacccagaacaacggcag

SEQ ID NO: 1253 - DNA, 20 bp, synthetic construct
  source 1..20: mol_type = other DNA
tgtagtacccagaacaacgg

SEQ ID NO: 1254 - DNA, 20 bp, synthetic construct
  source 1..20: mol_type = other DNA
tgctgtagtacccagaacaa

SEQ ID NO: 1255 - DNA, 20 bp, synthetic construct
  source 1..20: mol_type = other DNA
ttctgctgtagtacccagaa

SEQ ID NO: 1256 - DNA, 20 bp, synthetic construct
  source 1..20: mol_type = other DNA
cccttctgctgtagtaccca

SEQ ID NO: 1257 - DNA, 20 bp, synthetic construct
  source 1..20: mol_type = other DNA
atacccttctgctgtagtac

SEQ ID NO: 1258 - DNA, 20 bp, synthetic construct
  source 1..20: mol_type = other DNA
cgcatacccttctgctgtag

SEQ ID NO: 1259 - DNA, 20 bp, synthetic construct
  source 1..20: mol_type = other DNA
ttccgcatacccttctgctg

SEQ ID NO: 1260 - DNA, 20 bp, synthetic construct
  source 1..20: mol_type = other DNA
cgcttccgcatacccttctg

SEQ ID NO: 1261 - DNA, 20 bp, synthetic construct
  source 1..20: mol_type = other DNA
gctcgcttccgcataccctt

SEQ ID NO: 1262 - DNA, 20 bp, synthetic construct
  source 1..20: mol_type = other DNA
ggtgctcgcttccgcatacc

SEQ ID NO: 1263 - DNA, 20 bp, synthetic construct
  source 1..20: mol_type = other DNA
aggagccatctcagactggg

SEQ ID NO: 1264 - DNA, 20 bp, synthetic construct
  source 1..20: mol_type = other DNA
ggcaggagccatctcagact

SEQ ID NO: 1265 - DNA, 20 bp, synthetic construct
  source 1..20: mol_type = other DNA
accggcaggagccatctcag

SEQ ID NO: 1266 - DNA, 20 bp, synthetic construct
  source 1..20: mol_type = other DNA
cacaccggcaggagccatct

SEQ ID NO: 1267 - DNA, 20 bp, synthetic construct
  source 1..20: mol_type = other DNA
gctcacaccggcaggagcca

SEQ ID NO: 1268 - DNA, 20 bp, synthetic construct
  source 1..20: mol_type = other DNA
caggctcacaccggcaggag

SEQ ID NO: 1269 - DNA, 20 bp, synthetic construct
  source 1..20: mol_type = other DNA
cctcaggctcacaccggcag

SEQ ID NO: 1270 - DNA, 20 bp, synthetic construct
  source 1..20: mol_type = other DNA
ggccctcaggctcacaccgg

SEQ ID NO: 1271 - DNA, 20 bp, synthetic construct
  source 1..20: mol_type = other DNA
ggtggccctcaggctcacac

SEQ ID NO: 1272 - DNA, 20 bp, synthetic construct
  source 1..20: mol_type = other DNA
gatggtggccctcaggctca

SEQ ID NO: 1273 - DNA, 20 bp, synthetic construct
  source 1..20: mol_type = other DNA
gaggatggtggccctcaggc

SEQ ID NO: 1274 - DNA, 20 bp, synthetic construct
  source 1..20: mol_type = other DNA
gcagaggatggtggccctca

SEQ ID NO: 1275 - DNA, 20 bp, synthetic construct
  source 1..20: mol_type = other DNA
gaggcagaggatggtggccc

SEQ ID NO: 1276 - DNA, 20 bp, synthetic construct
  source 1..20: mol_type = other DNA
caggaggcagaggatggtgg

SEQ ID NO: 1277 - DNA, 20 bp, synthetic construct
  source 1..20: mol_type = other DNA
gcccaggccaggaggcagag

SEQ ID NO: 1278 - DNA, 20 bp, synthetic construct
  source 1..20: mol_type = other DNA
ccagcccaggccaggaggca

SEQ ID NO: 1279 - DNA, 20 bp, synthetic construct
  source 1..20: mol_type = other DNA
aggccagcccaggccaggag

SEQ ID NO: 1280 - DNA, 20 bp, synthetic construct
  source 1..20: mol_type = other DNA
gccaggccagcccaggccag

SEQ ID NO: 1281 - DNA, 20 bp, synthetic construct
  source 1..20: mol_type = other DNA
gcagccaggccagcccaggc

SEQ ID NO: 1282 - DNA, 20 bp, synthetic construct
  source 1..20: mol_type = other DNA
cctgcagccaggccagccca

SEQ ID NO: 1283 - DNA, 20 bp, synthetic construct
  source 1..20: mol_type = other DNA
tcacctgcagccaggccagc

SEQ ID NO: 1284 - DNA, 20 bp, synthetic construct
  source 1..20: mol_type = other DNA
cggtcacctgcagccaggcc

SEQ ID NO: 1285 - DNA, 20 bp, synthetic construct
  source 1..20: mol_type = other DNA
acccggtcacctgcagccag

SEQ ID NO: 1286 - DNA, 20 bp, synthetic construct
  source 1..20: mol_type = other DNA
tacacccggtcacctgcagc

SEQ ID NO: 1287 - DNA, 20 bp, synthetic construct
  source 1..20: mol_type = other DNA
atgtacacccggtcacctgc

SEQ ID NO: 1288 - DNA, 20 bp, synthetic construct
  source 1..20: mol_type = other DNA
tgtatgtacacccggtcacc

SEQ ID NO: 1289 - DNA, 20 bp, synthetic construct
  source 1..20: mol_type = other DNA
gggtgtatgtacacccggtc

SEQ ID NO: 1290 - DNA, 20 bp, synthetic construct
  source 1..20: mol_type = other DNA
tggatgacgaggtggaaggg

SEQ ID NO: 1291 - DNA, 20 bp, synthetic construct
  source 1..20: mol_type = other DNA
ttgtggatgacgaggtggaa

SEQ ID NO: 1292 - DNA, 20 bp, synthetic construct
  source 1..20: mol_type = other DNA
tcattgtggatgacgaggtg

SEQ ID NO: 1293 - DNA, 20 bp, synthetic construct
  source 1..20: mol_type = other DNA
ctctcattgtggatgacgag

SEQ ID NO: 1294 - DNA, 20 bp, synthetic construct
  source 1..20: mol_type = other DNA
gtactctcattgtggatgac

SEQ ID NO: 1295 - DNA, 20 bp, synthetic construct
  source 1..20: mol_type = other DNA
caggtactctcattgtggat

SEQ ID NO: 1296 - DNA, 20 bp, synthetic construct
  source 1..20: mol_type = other DNA
tcacaggtactctcattgtg

SEQ ID NO: 1297 - DNA, 20 bp, synthetic construct
  source 1..20: mol_type = other DNA
tgctcacaggtactctcatt

SEQ ID NO: 1298 - DNA, 20 bp, synthetic construct
  source 1..20: mol_type = other DNA
agctgctcacaggtactctc

SEQ ID NO: 1299 - DNA, 20 bp, synthetic construct
  source 1..20: mol_type = other DNA
gccagctgctcacaggtact

SEQ ID NO: 1300 - DNA, 20 bp, synthetic construct
  source 1..20: mol_type = other DNA
tttgccagctgctcacaggt

SEQ ID NO: 1301 - DNA, 20 bp, synthetic construct
  source 1..20: mol_type = other DNA
gcctttgccagctgctcaca

SEQ ID NO: 1302 - DNA, 20 bp, synthetic construct
  source 1..20: mol_type = other DNA
ttggcctttgccagctgctc

SEQ ID NO: 1303 - DNA, 20 bp, synthetic construct
  source 1..20: mol_type = other DNA
gcattggcctttgccagctg

SEQ ID NO: 1304 - DNA, 20 bp, synthetic construct
  source 1..20: mol_type = other DNA
ccggcattggcctttgccag

SEQ ID NO: 1305 - DNA, 20 bp, synthetic construct
  source 1..20: mol_type = other DNA
ttcccggcattggcctttgc

SEQ ID NO: 1306 - DNA, 20 bp, synthetic construct
  source 1..20: mol_type = other DNA
ggcttcccggcattggcctt

SEQ ID NO: 1307 - DNA, 20 bp, synthetic construct
  source 1..20: mol_type = other DNA
ttgggcttcccggcattggc

SEQ ID NO: 1308 - DNA, 20 bp, synthetic construct
  source 1..20: mol_type = other DNA
tctttgggcttcccggcatt

SEQ ID NO: 1309 - DNA, 20 bp, synthetic construct
  source 1..20: mol_type = other DNA
ggagcaggtatgaaggtggg

SEQ ID NO: 1310 - DNA, 20 bp, synthetic construct
  source 1..20: mol_type = other DNA
attggagcaggtatgaaggt

SEQ ID NO: 1311 - DNA, 20 bp, synthetic construct
  source 1..20: mol_type = other DNA
tgaattggagcaggtatgaa

SEQ ID NO: 1312 - DNA, 20 bp, synthetic construct
  source 1..20: mol_type = other DNA
gcctgaattggagcaggtat

SEQ ID NO: 1313 - DNA, 20 bp, synthetic construct
  source 1..20: mol_type = other DNA
ttggcctgaattggagcagg

SEQ ID NO: 1314 - DNA, 20 bp, synthetic construct
  source 1..20: mol_type = other DNA
gtcttggcctgaattggagc

SEQ ID NO: 1315 - DNA, 20 bp, synthetic construct
  source 1..20: mol_type = other DNA
gatgtcttggcctgaattgg

SEQ ID NO: 1316 - DNA, 20 bp, synthetic construct
  source 1..20: mol_type = other DNA
agggccttttcatccacagg

SEQ ID NO: 1317 - DNA, 20 bp, synthetic construct
  source 1..20: mol_type = other DNA
tgtagggccttttcatccac

SEQ ID NO: 1318 - DNA, 20 bp, synthetic construct
  source 1..20: mol_type = other DNA
tcctgtagggccttttcatc

SEQ ID NO: 1319 - DNA, 20 bp, synthetic construct
  source 1..20: mol_type = other DNA
tggtcctgtagggccttttc

SEQ ID NO: 1320 - DNA, 20 bp, synthetic construct
  source 1..20: mol_type = other DNA
agctggtcctgtagggcctt

SEQ ID NO: 1321 - DNA, 20 bp, synthetic construct
  source 1..20: mol_type = other DNA
accagctggtcctgtagggc

SEQ ID NO: 1322 - DNA, 20 bp, synthetic construct
  source 1..20: mol_type = other DNA
agcaccagctggtcctgtag

SEQ ID NO: 1323 - DNA, 20 bp, synthetic construct
  source 1..20: mol_type = other DNA
actagcaccagctggtcctg

SEQ ID NO: 1324 - DNA, 20 bp, synthetic construct
  source 1..20: mol_type = other DNA
gcgactagcaccagctggtc

SEQ ID NO: 1325 - DNA, 20 bp, synthetic construct
  source 1..20: mol_type = other DNA
gcagcgactagcaccagctg

SEQ ID NO: 1326 - DNA, 20 bp, synthetic construct
  source 1..20: mol_type = other DNA
tttgcagcgactagcaccag

SEQ ID NO: 1327 - DNA, 20 bp, synthetic construct
  source 1..20: mol_type = other DNA
agttttgcagcgactagcac

SEQ ID NO: 1328 - DNA, 20 bp, synthetic construct
  source 1..20: mol_type = other DNA
tcaagttttgcagcgactag

SEQ ID NO: 1329 - DNA, 20 bp, synthetic construct
  source 1..20: mol_type = other DNA
gtgtcaagttttgcagcgac

SEQ ID NO: 1330 - DNA, 20 bp, synthetic construct
  source 1..20: mol_type = other DNA
tcggtgtcaagttttgcagc

SEQ ID NO: 1331 - DNA, 20 bp, synthetic construct
  source 1..20: mol_type = other DNA
tcttcggtgtcaagttttgc

SEQ ID NO: 1332 - DNA, 20 bp, synthetic construct
  source 1..20: mol_type = other DNA
ttgtcttcggtgtcaagttt

SEQ ID NO: 1333 - DNA, 20 bp, synthetic construct
  source 1..20: mol_type = other DNA
aacttgtcttcggtgtcaag

SEQ ID NO: 1334 - DNA, 20 bp, synthetic construct
  source 1..20: mol_type = other DNA
ctcaacttgtcttcggtgtc

SEQ ID NO: 1335 - DNA, 20 bp, synthetic construct
  source 1..20: mol_type = other DNA
gccctcaacttgtcttcggt

SEQ ID NO: 1336 - DNA, 20 bp, synthetic construct
  source 1..20: mol_type = other DNA
gcggccctcaacttgtcttc

SEQ ID NO: 1337 - DNA, 20 bp, synthetic construct
  source 1..20: mol_type = other DNA
attgcggccctcaacttgtc

SEQ ID NO: 1338 - DNA, 20 bp, synthetic construct
  source 1..20: mol_type = other DNA
accattgcggccctcaactt

SEQ ID NO: 1339 - DNA, 20 bp, synthetic construct
  source 1..20: mol_type = other DNA
ccgaccattgcggccctcaa

SEQ ID NO: 1340 - DNA, 20 bp, synthetic construct
  source 1..20: mol_type = other DNA
atcccgaccattgcggccct

SEQ ID NO: 1341 - DNA, 20 bp, synthetic construct
  source 1..20: mol_type = other DNA
agcatcccgaccattgcggc

SEQ ID NO: 1342 - DNA, 20 bp, synthetic construct
  source 1..20: mol_type = other DNA
gccagcatcccgaccattgc

SEQ ID NO: 1343 - DNA, 20 bp, synthetic construct
  source 1..20: mol_type = other DNA
ttggccagcatcccgaccat

SEQ ID NO: 1344 - DNA, 20 bp, synthetic construct
  source 1..20: mol_type = other DNA
aagttggccagcatcccgac

SEQ ID NO: 1345 - DNA, 20 bp, synthetic construct
  source 1..20: mol_type = other DNA
aagaagttggccagcatccc

SEQ ID NO: 1346 - DNA, 20 bp, synthetic construct
  source 1..20: mol_type = other DNA
cccaagaagttggccagcat

SEQ ID NO: 1347 - DNA, 20 bp, synthetic construct
  source 1..20: mol_type = other DNA
aagcccaagaagttggccag

SEQ ID NO: 1348 - DNA, 20 bp, synthetic construct
  source 1..20: mol_type = other DNA
cggaagcccaagaagttggc

SEQ ID NO: 1349 - DNA, 20 bp, synthetic construct
  source 1..20: mol_type = other DNA
atacggaagcccaagaagtt

SEQ ID NO: 1350 - DNA, 20 bp, synthetic construct
  source 1..20: mol_type = other DNA
tatatacggaagcccaagaa

SEQ ID NO: 1351 - DNA, 20 bp, synthetic construct
  source 1..20: mol_type = other DNA
ccatatatacggaagcccaa

SEQ ID NO: 1352 - DNA, 20 bp, synthetic construct
  source 1..20: mol_type = other DNA
atgccatatatacggaagcc

SEQ ID NO: 1353 - DNA, 20 bp, synthetic construct
  source 1..20: mol_type = other DNA
tgcatgccatatatacggaa

SEQ ID NO: 1354 - DNA, 20 bp, synthetic construct
  source 1..20: mol_type = other DNA
ctgtgcatgccatatatacg

SEQ ID NO: 1355 - DNA, 20 bp, synthetic construct
  source 1..20: mol_type = other DNA
tcactgtgcatgccatatat

SEQ ID NO: 1356 - DNA, 20 bp, synthetic construct
  source 1..20: mol_type = other DNA
agctcactgtgcatgccata

SEQ ID NO: 1357 - DNA, 20 bp, synthetic construct
  source 1..20: mol_type = other DNA
catagctcactgtgcatgcc

SEQ ID NO: 1358 - DNA, 20 bp, synthetic construct
  source 1..20: mol_type = other DNA
ccccatagctcactgtgcat

SEQ ID NO: 1359 - DNA, 20 bp, synthetic construct
  source 1..20: mol_type = other DNA
acgccccatagctcactgtg

SEQ ID NO: 1360 - DNA, 20 bp, synthetic construct
  source 1..20: mol_type = other DNA
accacgccccatagctcact

SEQ ID NO: 1361 - DNA, 20 bp, synthetic construct
  source 1..20: mol_type = other DNA
tggaccacgccccatagctc

SEQ ID NO: 1362 - DNA, 20 bp, synthetic construct
  source 1..20: mol_type = other DNA
ccatggaccacgccccatag

SEQ ID NO: 1363 - DNA, 20 bp, synthetic construct
  source 1..20: mol_type = other DNA
gccccatggaccacgcccca

SEQ ID NO: 1364 - DNA, 20 bp, synthetic construct
  source 1..20: mol_type = other DNA
gtggccccatggaccacgcc

SEQ ID NO: 1365 - DNA, 20 bp, synthetic construct
  source 1..20: mol_type = other DNA
acggtggccccatggaccac

SEQ ID NO: 1366 - DNA, 20 bp, synthetic construct
  source 1..20: mol_type = other DNA
aggacggtggccccatggac

SEQ ID NO: 1367 - DNA, 20 bp, synthetic construct
  source 1..20: mol_type = other DNA
gagaggacggtggccccatg

SEQ ID NO: 1368 - DNA, 20 bp, synthetic construct
  source 1..20: mol_type = other DNA
tgccaaagacagccgttggg

SEQ ID NO: 1369 - DNA, 20 bp, synthetic construct
  source 1..20: mol_type = other DNA
gggtgccaaagacagccgtt

SEQ ID NO: 1370 - DNA, 20 bp, synthetic construct
  source 1..20: mol_type = other DNA
ccagggtgccaaagacagcc

SEQ ID NO: 1371 - DNA, 20 bp, synthetic construct
  source 1..20: mol_type = other DNA
aggccagggtgccaaagaca

SEQ ID NO: 1372 - DNA, 20 bp, synthetic construct
  source 1..20: mol_type = other DNA
gagaggccagggtgccaaag

SEQ ID NO: 1373 - DNA, 20 bp, synthetic construct
  source 1..20: mol_type = other DNA
agagagaggccagggtgcca

SEQ ID NO: 1374 - DNA, 20 bp, synthetic construct
  source 1..20: mol_type = other DNA
gatagagagaggccagggtg

SEQ ID NO: 1375 - DNA, 20 bp, synthetic construct
  source 1..20: mol_type = other DNA
ccagatagagagaggccagg

SEQ ID NO: 1376 - DNA, 20 bp, synthetic construct
  source 1..20: mol_type = other DNA
ctcccagatagagagaggcc

SEQ ID NO: 1377 - DNA, 20 bp, synthetic construct
  source 1..20: mol_type = other DNA
aggctcccagatagagagag

SEQ ID NO: 1378 - DNA, 20 bp, synthetic construct
  source 1..20: mol_type = other DNA
ccaaggctcccagatagaga

SEQ ID NO: 1379 - DNA, 20 bp, synthetic construct
  source 1..20: mol_type = other DNA
ggtccaaggctcccagatag

SEQ ID NO: 1380 - DNA, 20 bp, synthetic construct
  source 1..20: mol_type = other DNA
tgtggtccaaggctcccaga

SEQ ID NO: 1381 - DNA, 20 bp, synthetic construct
  source 1..20: mol_type = other DNA
ctgtgtggtccaaggctccc

SEQ ID NO: 1382 - DNA, 20 bp, synthetic construct
  source 1..20: mol_type = other DNA
cagctgtgtggtccaaggct

SEQ ID NO: 1383 - DNA, 20 bp, synthetic construct
  source 1..20: mol_type = other DNA
tgtcagctgtgtggtccaag

SEQ ID NO: 1384 - DNA, 20 bp, synthetic construct
  source 1..20: mol_type = other DNA
gcctgtcagctgtgtggtcc

SEQ ID NO: 1385 - DNA, 20 bp, synthetic construct
  source 1..20: mol_type = other DNA
gtagcctgtcagctgtgtgg

SEQ ID NO: 1386 - DNA, 20 bp, synthetic construct
  source 1..20: mol_type = other DNA
cctgtagcctgtcagctgtg

SEQ ID NO: 1387 - DNA, 20 bp, synthetic construct
  source 1..20: mol_type = other DNA
ttgcctgtagcctgtcagct

SEQ ID NO: 1388 - DNA, 20 bp, synthetic construct
  source 1..20: mol_type = other DNA
ggattgcctgtagcctgtca

SEQ ID NO: 1389 - DNA, 20 bp, synthetic construct
  source 1..20: mol_type = other DNA
ccaggattgcctgtagcctg

SEQ ID NO: 1390 - DNA, 20 bp, synthetic construct
  source 1..20: mol_type = other DNA
cacccaggattgcctgtagc

SEQ ID NO: 1391 - DNA, 20 bp, synthetic construct
  source 1..20: mol_type = other DNA
gaacacccaggattgcctgt

SEQ ID NO: 1392 - DNA, 20 bp, synthetic construct
  source 1..20: mol_type = other DNA
aaggaacacccaggattgcc

SEQ ID NO: 1393 - DNA, 20 bp, synthetic construct
  source 1..20: mol_type = other DNA
tccaaggaacacccaggatt

SEQ ID NO: 1394 - DNA, 20 bp, synthetic construct
  source 1..20: mol_type = other DNA
ccttccaaggaacacccagg

SEQ ID NO: 1395 - DNA, 20 bp, synthetic construct
  source 1..20: mol_type = other DNA
tgtccttccaaggaacaccc

SEQ ID NO: 1396 - DNA, 20 bp, synthetic construct
  source 1..20: mol_type = other DNA
tcttgtccttccaaggaaca

SEQ ID NO: 1397 - DNA, 20 bp, synthetic construct
  source 1..20: mol_type = other DNA
agttcttgtccttccaagga

SEQ ID NO: 1398 - DNA, 20 bp, synthetic construct
  source 1..20: mol_type = other DNA
tgcagttcttgtccttccaa

SEQ ID NO: 1399 - DNA, 20 bp, synthetic construct
  source 1..20: mol_type = other DNA
aggtgcagttcttgtccttc

SEQ ID NO: 1400 - DNA, 20 bp, synthetic construct
  source 1..20: mol_type = other DNA
gggaggtgcagttcttgtcc

SEQ ID NO: 1401 - DNA, 20 bp, synthetic construct
  source 1..20: mol_type = other DNA
gccgggaggtgcagttcttg

SEQ ID NO: 1402 - DNA, 20 bp, synthetic construct
  source 1..20: mol_type = other DNA
ccagccgggaggtgcagttc

SEQ ID NO: 1403 - DNA, 20 bp, synthetic construct
  source 1..20: mol_type = other DNA
catccagccgggaggtgcag

SEQ ID NO: 1404 - DNA, 20 bp, synthetic construct
  source 1..20: mol_type = other DNA
gcgcatccagccgggaggtg

SEQ ID NO: 1405 - DNA, 20 bp, synthetic construct
  source 1..20: mol_type = other DNA
tgtgcgcatccagccgggag

SEQ ID NO: 1406 - DNA, 20 bp, synthetic construct
  source 1..20: mol_type = other DNA
ccttgtgcgcatccagccgg

SEQ ID NO: 1407 - DNA, 20 bp, synthetic construct
  source 1..20: mol_type = other DNA
ggaccttgtgcgcatccagc

SEQ ID NO: 1408 - DNA, 20 bp, synthetic construct
  source 1..20: mol_type = other DNA
acaggaccttgtgcgcatcc

SEQ ID NO: 1409 - DNA, 20 bp, synthetic construct
  source 1..20: mol_type = other DNA
cagacaggaccttgtgcgca

SEQ ID NO: 1410 - DNA, 20 bp, synthetic construct
  source 1..20: mol_type = other DNA
gggcagacaggaccttgtgc

SEQ ID NO: 1411 - DNA, 20 bp, synthetic construct
  source 1..20: mol_type = other DNA
gcagggcagacaggaccttg

SEQ ID NO: 1412 - DNA, 20 bp, synthetic construct
  source 1..20: mol_type = other DNA
cctgcagggcagacaggacc

SEQ ID NO: 1413 - DNA, 20 bp, synthetic construct
  source 1..20: mol_type = other DNA
cagcctgcagggcagacagg

SEQ ID NO: 1414 - DNA, 20 bp, synthetic construct
  source 1..20: mol_type = other DNA
gtacagcctgcagggcagac

SEQ ID NO: 1415 - DNA, 20 bp, synthetic construct
  source 1..20: mol_type = other DNA
cctgtacagcctgcagggca

SEQ ID NO: 1416 - DNA, 20 bp, synthetic construct
  source 1..20: mol_type = other DNA
ggccctgtacagcctgcagg

SEQ ID NO: 1417 - DNA, 20 bp, synthetic construct
  source 1..20: mol_type = other DNA
gcaggccctgtacagcctgc

SEQ ID NO: 1418 - DNA, 20 bp, synthetic construct
  source 1..20: mol_type = other DNA
ctagcaggccctgtacagcc

SEQ ID NO: 1419 - DNA, 20 bp, synthetic construct
  source 1..20: mol_type = other DNA
ccactagcaggccctgtaca

SEQ ID NO: 1420 - DNA, 20 bp, synthetic construct
  source 1..20: mol_type = other DNA
gggccactagcaggccctgt

SEQ ID NO: 1421 - DNA, 20 bp, synthetic construct
  source 1..20: mol_type = other DNA
cctgggccactagcaggccc

SEQ ID NO: 1422 - DNA, 20 bp, synthetic construct
  source 1..20: mol_type = other DNA
tgccctgggccactagcagg

SEQ ID NO: 1423 - DNA, 20 bp, synthetic construct
  source 1..20: mol_type = other DNA
ccctgccctgggccactagc

SEQ ID NO: 1424 - DNA, 20 bp, synthetic construct
  source 1..20: mol_type = other DNA
cagccctgccctgggccact

SEQ ID NO: 1425 - DNA, 20 bp, synthetic construct
  source 1..20: mol_type = other DNA
tatcagccctgccctgggcc

SEQ ID NO: 1426 - DNA, 20 bp, synthetic construct
  source 1..20: mol_type = other DNA
ggctatcagccctgccctgg

SEQ ID NO: 1427 - DNA, 20 bp, synthetic construct
  source 1..20: mol_type = other DNA
cctggctatcagccctgccc

SEQ ID NO: 1428 - DNA, 20 bp, synthetic construct
  source 1..20: mol_type = other DNA
gggcctggctatcagccctg

SEQ ID NO: 1429 - DNA, 20 bp, synthetic construct
  source 1..20: mol_type = other DNA
gctgggcctggctatcagcc

SEQ ID NO: 1430 - DNA, 20 bp, synthetic construct
  source 1..20: mol_type = other DNA
gcagctgggcctggctatca

SEQ ID NO: 1431 - DNA, 20 bp, synthetic construct
  source 1..20: mol_type = other DNA
gcagcagctgggcctggcta

SEQ ID NO: 1432 - DNA, 20 bp, synthetic construct
  source 1..20: mol_type = other DNA
acagcagcagctgggcctgg

SEQ ID NO: 1433 - DNA, 20 bp, synthetic construct
  source 1..20: mol_type = other DNA
tggacagcagcagctgggcc

SEQ ID NO: 1434 - DNA, 20 bp, synthetic construct
  source 1..20: mol_type = other DNA
ccgtggacagcagcagctgg

SEQ ID NO: 1435 - DNA, 20 bp, synthetic construct
  source 1..20: mol_type = other DNA
ccaccgtggacagcagcagc

SEQ ID NO: 1436 - DNA, 20 bp, synthetic construct
  source 1..20: mol_type = other DNA
ccaccaccgtggacagcagc

SEQ ID NO: 1437 - DNA, 20 bp, synthetic construct
  source 1..20: mol_type = other DNA
cgcccaccaccgtggacagc

SEQ ID NO: 1438 - DNA, 20 bp, synthetic construct
  source 1..20: mol_type = other DNA
acacgcccaccaccgtggac

SEQ ID NO: 1439 - DNA, 20 bp, synthetic construct
  source 1..20: mol_type = other DNA
tgaacacgcccaccaccgtg

SEQ ID NO: 1440 - DNA, 20 bp, synthetic construct
  source 1..20: mol_type = other DNA
ctgtgaacacgcccaccacc

SEQ ID NO: 1441 - DNA, 20 bp, synthetic construct
  source 1..20: mol_type = other DNA
gggctgtgaacacgcccacc

SEQ ID NO: 1442 - DNA, 20 bp, synthetic construct
  source 1..20: mol_type = other DNA
gcttcaggtgcaggcctggg

SEQ ID NO: 1443 - DNA, 20 bp, synthetic construct
  source 1..20: mol_type = other DNA
gctgcttcaggtgcaggcct

SEQ ID NO: 1444 - DNA, 20 bp, synthetic construct
  source 1..20: mol_type = other DNA
acggctgcttcaggtgcagg

SEQ ID NO: 1445 - DNA, 20 bp, synthetic construct
  source 1..20: mol_type = other DNA
caaacggctgcttcaggtgc

SEQ ID NO: 1446 - DNA, 20 bp, synthetic construct
  source 1..20: mol_type = other DNA
gcacaaacggctgcttcagg

SEQ ID NO: 1447 - DNA, 20 bp, synthetic construct
  source 1..20: mol_type = other DNA
cctgcacaaacggctgcttc

SEQ ID NO: 1448 - DNA, 20 bp, synthetic construct
  source 1..20: mol_type = other DNA
ggccctgcacaaacggctgc

SEQ ID NO: 1449 - DNA, 20 bp, synthetic construct
  source 1..20: mol_type = other DNA
ccaggccctgcacaaacggc

SEQ ID NO: 1450 - DNA, 20 bp, synthetic construct
  source 1..20: mol_type = other DNA
gagccaggccctgcacaaac

SEQ ID NO: 1451 - DNA, 20 bp, synthetic construct
  source 1..20: mol_type = other DNA
agagagccaggccctgcaca

SEQ ID NO: 1452 - DNA, 20 bp, synthetic construct
  source 1..20: mol_type = other DNA
tatagagagccaggccctgc

SEQ ID NO: 1453 - DNA, 20 bp, synthetic construct
  source 1..20: mol_type = other DNA
gggtatagagagccaggccc

SEQ ID NO: 1454 - DNA, 20 bp, synthetic construct
  source 1..20: mol_type = other DNA
tctgtgaagtccagagagcg

SEQ ID NO: 1455 - DNA, 20 bp, synthetic construct
  source 1..20: mol_type = other DNA
agttctgtgaagtccagaga

SEQ ID NO: 1456 - DNA, 20 bp, synthetic construct
  source 1..20: mol_type = other DNA
tccagttctgtgaagtccag

SEQ ID NO: 1457 - DNA, 20 bp, synthetic construct
  source 1..20: mol_type = other DNA
acatccagttctgtgaagtc

SEQ ID NO: 1458 - DNA, 20 bp, synthetic construct
  source 1..20: mol_type = other DNA
gcaacatccagttctgtgaa

SEQ ID NO: 1459 - DNA, 20 bp, synthetic construct
  source 1..20: mol_type = other DNA
gcagcaacatccagttctgt

SEQ ID NO: 1460 - DNA, 20 bp, synthetic construct
  source 1..20: mol_type = other DNA
tcagcagcaacatccagttc

SEQ ID NO: 1461 - DNA, 20 bp, synthetic construct
  source 1..20: mol_type = other DNA
ttctcagcagcaacatccag

SEQ ID NO: 1462 - DNA, 20 bp, synthetic construct
  source 1..20: mol_type = other DNA
atcttctcagcagcaacatc

SEQ ID NO: 1463 - DNA, 20 bp, synthetic construct
  source 1..20: mol_type = other DNA
tcaatcttctcagcagcaac

SEQ ID NO: 1464 - DNA, 20 bp, synthetic construct
  source 1..20: mol_type = other DNA
ctgtcaatcttctcagcagc

SEQ ID NO: 1465 - DNA, 20 bp, synthetic construct
  source 1..20: mol_type = other DNA
aacctgtcaatcttctcagc

SEQ ID NO: 1466 - DNA, 20 bp, synthetic construct
  source 1..20: mol_type = other DNA
atgaacctgtcaatcttctc

SEQ ID NO: 1467 - DNA, 20 bp, synthetic construct
  source 1..20: mol_type = other DNA
tgcatgaacctgtcaatctt

SEQ ID NO: 1468 - DNA, 20 bp, synthetic construct
  source 1..20: mol_type = other DNA
gcctgcatgaacctgtcaat

SEQ ID NO: 1469 - DNA, 20 bp, synthetic construct
  source 1..20: mol_type = other DNA
acagcctgcatgaacctgtc

SEQ ID NO: 1470 - DNA, 20 bp, synthetic construct
  source 1..20: mol_type = other DNA
gtcacagcctgcatgaacct

SEQ ID NO: 1471 - DNA, 20 bp, synthetic construct
  source 1..20: mol_type = other DNA
cctgtcacagcctgcatgaa

SEQ ID NO: 1472 - DNA, 20 bp, synthetic construct
  source 1..20: mol_type = other DNA
catcctgtcacagcctgcat

SEQ ID NO: 1473 - DNA, 20 bp, synthetic construct
  source 1..20: mol_type = other DNA
ttccatcctgtcacagcctg

SEQ ID NO: 1474 - DNA, 20 bp, synthetic construct
  source 1..20: mol_type = other DNA
gtcttccatcctgtcacagc

SEQ ID NO: 1475 - DNA, 20 bp, synthetic construct
  source 1..20: mol_type = other DNA
ccagtcttccatcctgtcac

SEQ ID NO: 1476 - DNA, 20 bp, synthetic construct
  source 1..20: mol_type = other DNA
cagccagtcttccatcctgt

SEQ ID NO: 1477 - DNA, 20 bp, synthetic construct
  source 1..20: mol_type = other DNA
gagcagccagtcttccatcc

SEQ ID NO: 1478 - DNA, 20 bp, synthetic construct
  source 1..20: mol_type = other DNA
agggagcagccagtcttcca

SEQ ID NO: 1479 - DNA, 20 bp, synthetic construct
  source 1..20: mol_type = other DNA
atcagggagcagccagtctt

SEQ ID NO: 1480 - DNA, 20 bp, synthetic construct
  source 1..20: mol_type = other DNA
cccatcagggagcagccagt

SEQ ID NO: 1481 - DNA, 20 bp, synthetic construct
  source 1..20: mol_type = other DNA
gctcccatcagggagcagcc

SEQ ID NO: 1482 - DNA, 20 bp, synthetic construct
  source 1..20: mol_type = other DNA
ctggctcccatcagggagca

SEQ ID NO: 1483 - DNA, 20 bp, synthetic construct
  source 1..20: mol_type = other DNA
acactggctcccatcaggga

SEQ ID NO: 1484 - DNA, 20 bp, synthetic construct
  source 1..20: mol_type = other DNA
tccacactggctcccatcag

SEQ ID NO: 1485 - DNA, 20 bp, synthetic construct
  source 1..20: mol_type = other DNA
ctgtccacactggctcccat

SEQ ID NO: 1486 - DNA, 20 bp, synthetic construct
  source 1..20: mol_type = other DNA
gtgctgtccacactggctcc

SEQ ID NO: 1487 - DNA, 20 bp, synthetic construct
  source 1..20: mol_type = other DNA
agggtgctgtccacactggc

SEQ ID NO: 1488 - DNA, 20 bp, synthetic construct
  source 1..20: mol_type = other DNA
gccagggtgctgtccacact

SEQ ID NO: 1489 - DNA, 20 bp, synthetic construct
  source 1..20: mol_type = other DNA
aaagccagggtgctgtccac

SEQ ID NO: 1490 - DNA, 20 bp, synthetic construct
  source 1..20: mol_type = other DNA
ttgaaagccagggtgctgtc

SEQ ID NO: 1491 - DNA, 20 bp, synthetic construct
  source 1..20: mol_type = other DNA
gtgttgaaagccagggtgct

SEQ ID NO: 1492 - DNA, 20 bp, synthetic construct
  source 1..20: mol_type = other DNA
taggtgttgaaagccagggt

SEQ ID NO: 1493 - DNA, 20 bp, synthetic construct
  source 1..20: mol_type = other DNA
tcttcccttggaagtggacg

SEQ ID NO: 1494 - DNA, 20 bp, synthetic construct
  source 1..20: mol_type = other DNA
tcatcttcccttggaagtgg

SEQ ID NO: 1495 - DNA, 20 bp, synthetic construct
  source 1..20: mol_type = other DNA
ccttcatcttcccttggaag

SEQ ID NO: 1496 - DNA, 20 bp, synthetic construct
  source 1..20: mol_type = other DNA
agcccttcatcttcccttgg

SEQ ID NO: 1497 - DNA, 20 bp, synthetic construct
  source 1..20: mol_type = other DNA
agaagcccttcatcttccct

SEQ ID NO: 1498 - DNA, 20 bp, synthetic construct
  source 1..20: mol_type = other DNA
gggagaagcccttcatcttc

SEQ ID NO: 1499 - DNA, 20 bp, synthetic construct
  source 1..20: mol_type = other DNA
gcagggagaagcccttcatc

SEQ ID NO: 1500 - DNA, 20 bp, synthetic construct
  source 1..20: mol_type = other DNA
ccagcagggagaagcccttc

SEQ ID NO: 1501 - DNA, 20 bp, synthetic construct
  source 1..20: mol_type = other DNA
cggccagcagggagaagccc

SEQ ID NO: 1502 - DNA, 20 bp, synthetic construct
  source 1..20: mol_type = other DNA
gctcggccagcagggagaag

SEQ ID NO: 1503 - DNA, 20 bp, synthetic construct
  source 1..20: mol_type = other DNA
gtccacccagaactcctggg

SEQ ID NO: 1504 - DNA, 20 bp, synthetic construct
  source 1..20: mol_type = other DNA
gttgtccacccagaactcct

SEQ ID NO: 1505 - DNA, 20 bp, synthetic construct
  source 1..20: mol_type = other DNA
gctgttgtccacccagaact

SEQ ID NO: 1506 - DNA, 20 bp, synthetic construct
  source 1..20: mol_type = other DNA
ggtgctgttgtccacccaga

SEQ ID NO: 1507 - DNA, 20 bp, synthetic construct
  source 1..20: mol_type = other DNA
tgaggtgctgttgtccaccc

SEQ ID NO: 1508 - DNA, 20 bp, synthetic construct
  source 1..20: mol_type = other DNA
cactgaggtgctgttgtcca

SEQ ID NO: 1509 - DNA, 20 bp, synthetic construct
  source 1..20: mol_type = other DNA
agacactgaggtgctgttgt

SEQ ID NO: 1510 - DNA, 20 bp, synthetic construct
  source 1..20: mol_type = other DNA
aacagacactgaggtgctgt

SEQ ID NO: 1511 - DNA, 20 bp, synthetic construct
  source 1..20: mol_type = other DNA
gggaacagacactgaggtgc

SEQ ID NO: 1512 - DNA, 20 bp, synthetic construct
  source 1..20: mol_type = other DNA
catgggaacagacactgagg

SEQ ID NO: 1513 - DNA, 20 bp, synthetic construct
  source 1..20: mol_type = other DNA
gagcatgggaacagacactg

SEQ ID NO: 1514 - DNA, 20 bp, synthetic construct
  source 1..20: mol_type = other DNA
agagagcatgggaacagaca

SEQ ID NO: 1515 - DNA, 20 bp, synthetic construct
  source 1..20: mol_type = other DNA
gccagagagcatgggaacag

SEQ ID NO: 1516 - DNA, 20 bp, synthetic construct
  source 1..20: mol_type = other DNA
catgccagagagcatgggaa

SEQ ID NO: 1517 - DNA, 20 bp, synthetic construct
  source 1..20: mol_type = other DNA
gcccatgccagagagcatgg

SEQ ID NO: 1518 - DNA, 20 bp, synthetic construct
  source 1..20: mol_type = other DNA
ggtgcccatgccagagagca

SEQ ID NO: 1519 - DNA, 20 bp, synthetic construct
  source 1..20: mol_type = other DNA
gaaggtgcccatgccagaga

SEQ ID NO: 1520 - DNA, 20 bp, synthetic construct
  source 1..20: mol_type = other DNA
ctggaaggtgcccatgccag

SEQ ID NO: 1521 - DNA, 20 bp, synthetic construct
  source 1..20: mol_type = other DNA
gtgctggaaggtgcccatgc

SEQ ID NO: 1522 - DNA, 20 bp, synthetic construct
  source 1..20: mol_type = other DNA
ccagtgctggaaggtgccca

SEQ ID NO: 1523 - DNA, 20 bp, synthetic construct
  source 1..20: mol_type = other DNA
actccagtgctggaaggtgc

SEQ ID NO: 1524 - DNA, 20 bp, synthetic construct
  source 1..20: mol_type = other DNA
gtcactccagtgctggaagg

SEQ ID NO: 1525 - DNA, 20 bp, synthetic construct
  source 1..20: mol_type = other DNA
gatgtcactccagtgctgga

SEQ ID NO: 1526 - DNA, 20 bp, synthetic construct
  source 1..20: mol_type = other DNA
ctggatgtcactccagtgct

SEQ ID NO: 1527 - DNA, 20 bp, synthetic construct
  source 1..20: mol_type = other DNA
gtcctggatgtcactccagt

SEQ ID NO: 1528 - DNA, 20 bp, synthetic construct
  source 1..20: mol_type = other DNA
gttgtcctggatgtcactcc

SEQ ID NO: 1529 - DNA, 20 bp, synthetic construct
  source 1..20: mol_type = other DNA
gaagttgtcctggatgtcac

SEQ ID NO: 1530 - DNA, 20 bp, synthetic construct
  source 1..20: mol_type = other DNA
cgagaagttgtcctggatgt

SEQ ID NO: 1531 - DNA, 20 bp, synthetic construct
  source 1..20: mol_type = other DNA
caccgagaagttgtcctgga

SEQ ID NO: 1532 - DNA, 20 bp, synthetic construct
  source 1..20: mol_type = other DNA
agtcaccgagaagttgtcct

SEQ ID NO: 1533 - DNA, 20 bp, synthetic construct
  source 1..20: mol_type = other DNA
ttgagtcaccgagaagttgt

SEQ ID NO: 1534 - DNA, 20 bp, synthetic construct
  source 1..20: mol_type = other DNA
cacttgagtcaccgagaagt

SEQ ID NO: 1535 - DNA, 20 bp, synthetic construct
  source 1..20: mol_type = other DNA
gggcacttgagtcaccgaga

SEQ ID NO: 1536 - DNA, 20 bp, synthetic construct
  source 1..20: mol_type = other DNA
gaagggcacttgagtcaccg

SEQ ID NO: 1537 - DNA, 20 bp, synthetic construct
  source 1..20: mol_type = other DNA
agtgaagggcacttgagtca

SEQ ID NO: 1538 - DNA, 20 bp, synthetic construct
  source 1..20: mol_type = other DNA
ctcagtgaagggcacttgag

SEQ ID NO: 1539 - DNA, 20 bp, synthetic construct
  source 1..20: mol_type = other DNA
gctctcagtgaagggcactt

SEQ ID NO: 1540 - DNA, 20 bp, synthetic construct
  source 1..20: mol_type = other DNA
gatcagcagcaggcaggcgc

SEQ ID NO: 1541 - DNA, 20 bp, synthetic construct
  source 1..20: mol_type = other DNA
ctggatcagcagcaggcagg

SEQ ID NO: 1542 - DNA, 20 bp, synthetic construct
  source 1..20: mol_type = other DNA
aggctggatcagcagcaggc

SEQ ID NO: 1543 - DNA, 20 bp, synthetic construct
  source 1..20: mol_type = other DNA
gtgaggctggatcagcagca

SEQ ID NO: 1544 - DNA, 20 bp, synthetic construct
  source 1..20: mol_type = other DNA
atagtgaggctggatcagca

SEQ ID NO: 1545 - DNA, 20 bp, synthetic construct
  source 1..20: mol_type = other DNA
ggcatagtgaggctggatca

SEQ ID NO: 1546 - DNA, 20 bp, synthetic construct
  source 1..20: mol_type = other DNA
agaggcatagtgaggctgga

SEQ ID NO: 1547 - DNA, 20 bp, synthetic construct
  source 1..20: mol_type = other DNA
gtcagaggcatagtgaggct

SEQ ID NO: 1548 - DNA, 20 bp, synthetic construct
  source 1..20: mol_type = other DNA
caggtcagaggcatagtgag

SEQ ID NO: 1549 - DNA, 20 bp, synthetic construct
  source 1..20: mol_type = other DNA
gtccaggtcagaggcatagt

SEQ ID NO: 1550 - DNA, 20 bp, synthetic construct
  source 1..20: mol_type = other DNA
cttgtccaggtcagaggcat

SEQ ID NO: 1551 - DNA, 20 bp, synthetic construct
  source 1..20: mol_type = other DNA
caccttgtccaggtcagagg

SEQ ID NO: 1552 - DNA, 20 bp, synthetic construct
  source 1..20: mol_type = other DNA
ctccaccttgtccaggtcag

SEQ ID NO: 1553 - DNA, 20 bp, synthetic construct
  source 1..20: mol_type = other DNA
accctccaccttgtccaggt

SEQ ID NO: 1554 - DNA, 20 bp, synthetic construct
  source 1..20: mol_type = other DNA
gagaccctccaccttgtcca

SEQ ID NO: 1555 - DNA, 20 bp, synthetic construct
  source 1..20: mol_type = other DNA
agtgagaccctccaccttgt

SEQ ID NO: 1556 - DNA, 20 bp, synthetic construct
  source 1..20: mol_type = other DNA
gaaagtgagaccctccacct

SEQ ID NO: 1557 - DNA, 20 bp, synthetic construct
  source 1..20: mol_type = other DNA
ctggaaagtgagaccctcca

SEQ ID NO: 1558 - DNA, 20 bp, synthetic construct
  source 1..20: mol_type = other DNA
ttgctggaaagtgagaccct

SEQ ID NO: 1559 - DNA, 20 bp, synthetic construct
  source 1..20: mol_type = other DNA
gttttgctggaaagtgagac

SEQ ID NO: 1560 - DNA, 20 bp, synthetic construct
  source 1..20: mol_type = other DNA
ggagttttgctggaaagtga

SEQ ID NO: 1561 - DNA, 20 bp, synthetic construct
  source 1..20: mol_type = other DNA
gagggagttttgctggaaag

SEQ ID NO: 1562 - DNA, 20 bp, synthetic construct
  source 1..20: mol_type = other DNA
gttgagggagttttgctgga

SEQ ID NO: 1563 - DNA, 20 bp, synthetic construct
  source 1..20: mol_type = other DNA
ccagttgagggagttttgct

SEQ ID NO: 1564 - DNA, 20 bp, synthetic construct
  source 1..20: mol_type = other DNA
catccagttgagggagtttt

SEQ ID NO: 1565 - DNA, 20 bp, synthetic construct
  source 1..20: mol_type = other DNA
cttcatccagttgagggagt

SEQ ID NO: 1566 - DNA, 20 bp, synthetic construct
  source 1..20: mol_type = other DNA
tttcttcatccagttgaggg

SEQ ID NO: 1567 - DNA, 20 bp, synthetic construct
  source 1..20: mol_type = other DNA
tagtttcttcatccagttga

SEQ ID NO: 1568 - DNA, 20 bp, synthetic construct
  source 1..20: mol_type = other DNA
agatagtttcttcatccagt

SEQ ID NO: 1569 - DNA, 20 bp, synthetic construct
  source 1..20: mol_type = other DNA
gggagatagtttcttcatcc

SEQ ID NO: 1570 - DNA, 20 bp, synthetic construct
  source 1..20: mol_type = other DNA
ggtcaggtggatggtccggg

SEQ ID NO: 1571 - DNA, 20 bp, synthetic construct
  source 1..20: mol_type = other DNA
catggtcaggtggatggtcc

SEQ ID NO: 1572 - DNA, 20 bp, synthetic construct
  source 1..20: mol_type = other DNA
gggcatggtcaggtggatgg

SEQ ID NO: 1573 - DNA, 20 bp, synthetic construct
  source 1..20: mol_type = other DNA
tccttgcagcaccagttggg

SEQ ID NO: 1574 - DNA, 20 bp, synthetic construct
  source 1..20: mol_type = other DNA
agatccttgcagcaccagtt

SEQ ID NO: 1575 - DNA, 20 bp, synthetic construct
  source 1..20: mol_type = other DNA
ataagatccttgcagcacca

SEQ ID NO: 1576 - DNA, 20 bp, synthetic construct
  source 1..20: mol_type = other DNA
gtcataagatccttgcagca

SEQ ID NO: 1577 - DNA, 20 bp, synthetic construct
  source 1..20: mol_type = other DNA
caggtcataagatccttgca

SEQ ID NO: 1578 - DNA, 20 bp, synthetic construct
  source 1..20: mol_type = other DNA
ctgcaggtcataagatcctt

SEQ ID NO: 1579 - DNA, 20 bp, synthetic construct
  source 1..20: mol_type = other DNA
gtcctgcaggtcataagatc

SEQ ID NO: 1580 - DNA, 20 bp, synthetic construct
  source 1..20: mol_type = other DNA
caggtcctgcaggtcataag

SEQ ID NO: 1581 - DNA, 20 bp, synthetic construct
  source 1..20: mol_type = other DNA
gagcaggtcctgcaggtcat

SEQ ID NO: 1582 - DNA, 20 bp, synthetic construct
  source 1..20: mol_type = other DNA
ggcgagcaggtcctgcaggt

SEQ ID NO: 1583 - DNA, 20 bp, synthetic construct
  source 1..20: mol_type = other DNA
ctgggcgagcaggtcctgca

SEQ ID NO: 1584 - DNA, 20 bp, synthetic construct
  source 1..20: mol_type = other DNA
agcctgggcgagcaggtcct

SEQ ID NO: 1585 - DNA, 20 bp, synthetic construct
  source 1..20: mol_type = other DNA
ctcagcctgggcgagcaggt

SEQ ID NO: 1586 - DNA, 20 bp, synthetic construct
  source 1..20: mol_type = other DNA
cagctcagcctgggcgagca

SEQ ID NO: 1587 - DNA, 20 bp, synthetic construct
  source 1..20: mol_type = other DNA
tggcgggcagctcagcctgg

SEQ ID NO: 1588 - DNA, 20 bp, synthetic construct
  source 1..20: mol_type = other DNA
gaatggcgggcagctcagcc

SEQ ID NO: 1589 - DNA, 20 bp, synthetic construct
  source 1..20: mol_type = other DNA
gcagaatggcgggcagctca

SEQ ID NO: 1590 - DNA, 20 bp, synthetic construct
  source 1..20: mol_type = other DNA
tgtgcagaatggcgggcagc

SEQ ID NO: 1591 - DNA, 20 bp, synthetic construct
  source 1..20: mol_type = other DNA
cggtgtgcagaatggcgggc

SEQ ID NO: 1592 - DNA, 20 bp, synthetic construct
  source 1..20: mol_type = other DNA
gctcggtgtgcagaatggcg

SEQ ID NO: 1593 - DNA, 20 bp, synthetic construct
  source 1..20: mol_type = other DNA
tcagctcggtgtgcagaatg

SEQ ID NO: 1594 - DNA, 20 bp, synthetic construct
  source 1..20: mol_type = other DNA
ggttcagctcggtgtgcaga

SEQ ID NO: 1595 - DNA, 20 bp, synthetic construct
  source 1..20: mol_type = other DNA
gcaggttcagctcggtgtgc

SEQ ID NO: 1596 - DNA, 20 bp, synthetic construct
  source 1..20: mol_type = other DNA
tttgcaggttcagctcggtg

SEQ ID NO: 1597 - DNA, 20 bp, synthetic construct
  source 1..20: mol_type = other DNA
atttttgcaggttcagctcg

SEQ ID NO: 1598 - DNA, 20 bp, synthetic construct
  source 1..20: mol_type = other DNA
tcaatttttgcaggttcagc

SEQ ID NO: 1599 - DNA, 20 bp, synthetic construct
  source 1..20: mol_type = other DNA
tgctcaatttttgcaggttc

SEQ ID NO: 1600 - DNA, 20 bp, synthetic construct
  source 1..20: mol_type = other DNA
cattgctcaatttttgcagg

SEQ ID NO: 1601 - DNA, 20 bp, synthetic construct
  source 1..20: mol_type = other DNA
ggtcattgctcaatttttgc

SEQ ID NO: 1602 - DNA, 20 bp, synthetic construct
  source 1..20: mol_type = other DNA
tgcggtcattgctcaatttt

SEQ ID NO: 1603 - DNA, 20 bp, synthetic construct
  source 1..20: mol_type = other DNA
tgatgcggtcattgctcaat

SEQ ID NO: 1604 - DNA, 20 bp, synthetic construct
  source 1..20: mol_type = other DNA
ccctgatgcggtcattgctc

SEQ ID NO: 1605 - DNA, 20 bp, synthetic construct
  source 1..20: mol_type = other DNA
ccaccctgatgcggtcattg

SEQ ID NO: 1606 - DNA, 20 bp, synthetic construct
  source 1..20: mol_type = other DNA
cccccaccctgatgcggtca

SEQ ID NO: 1607 - DNA, 20 bp, synthetic construct
  source 1..20: mol_type = other DNA
cctcccccaccctgatgcgg

SEQ ID NO: 1608 - DNA, 20 bp, synthetic construct
  source 1..20: mol_type = other DNA
gcacctcccccaccctgatg

SEQ ID NO: 1609 - DNA, 20 bp, synthetic construct
  source 1..20: mol_type = other DNA
tcagcacctcccccaccctg

SEQ ID NO: 1610 - DNA, 20 bp, synthetic construct
  source 1..20: mol_type = other DNA
tgttcagcacctcccccacc

SEQ ID NO: 1611 - DNA, 20 bp, synthetic construct
  source 1..20: mol_type = other DNA
tgctgttcagcacctccccc

SEQ ID NO: 1612 - DNA, 20 bp, synthetic construct
  source 1..20: mol_type = other DNA
aaatgctgttcagcacctcc

SEQ ID NO: 1613 - DNA, 20 bp, synthetic construct
  source 1..20: mol_type = other DNA
aaaaaatgctgttcagcacc

SEQ ID NO: 1614 - DNA, 20 bp, synthetic construct
  source 1..20: mol_type = other DNA
caaaaaaaatgctgttcagc

SEQ ID NO: 1615 - DNA, 20 bp, synthetic construct
  source 1..20: mol_type = other DNA
gctcaaaaaaaatgctgttc

SEQ ID NO: 1616 - DNA, 20 bp, synthetic construct
  source 1..20: mol_type = other DNA
caagctcaaaaaaaatgctg

SEQ ID NO: 1617 - DNA, 20 bp, synthetic construct
  source 1..20: mol_type = other DNA
cttcaagctcaaaaaaaatg

SEQ ID NO: 1618 - DNA, 20 bp, synthetic construct
  source 1..20: mol_type = other DNA
ccgcttcaagctcaaaaaaa

SEQ ID NO: 1619 - DNA, 20 bp, synthetic construct
  source 1..20: mol_type = other DNA
catccgcttcaagctcaaaa

SEQ ID NO: 1620 - DNA, 20 bp, synthetic construct
  source 1..20: mol_type = other DNA
tctcatccgcttcaagctca

SEQ ID NO: 1621 - DNA, 20 bp, synthetic construct
  source 1..20: mol_type = other DNA
ctctctcatccgcttcaagc

SEQ ID NO: 1622 - DNA, 20 bp, synthetic construct
  source 1..20: mol_type = other DNA
gctctctctcatccgcttca

SEQ ID NO: 1623 - DNA, 20 bp, synthetic construct
  source 1..20: mol_type = other DNA
tgggctctctctcatccgct

SEQ ID NO: 1624 - DNA, 20 bp, synthetic construct
  source 1..20: mol_type = other DNA
ctgtgggctctctctcatcc

SEQ ID NO: 1625 - DNA, 20 bp, synthetic construct
  source 1..20: mol_type = other DNA
actctgtgggctctctctca

SEQ ID NO: 1626 - DNA, 20 bp, synthetic construct
  source 1..20: mol_type = other DNA
tagactctgtgggctctctc

SEQ ID NO: 1627 - DNA, 20 bp, synthetic construct
  source 1..20: mol_type = other DNA
ctgttgggtagactctgtgg

SEQ ID NO: 1628 - DNA, 20 bp, synthetic construct
  source 1..20: mol_type = other DNA
aagctgttgggtagactctg

SEQ ID NO: 1629 - DNA, 20 bp, synthetic construct
  source 1..20: mol_type = other DNA
gttaagctgttgggtagact

SEQ ID NO: 1630 - DNA, 20 bp, synthetic construct
  source 1..20: mol_type = other DNA
cttgttaagctgttgggtag

SEQ ID NO: 1631 - DNA, 20 bp, synthetic construct
  source 1..20: mol_type = other DNA
aggcttgttaagctgttggg

SEQ ID NO: 1632 - DNA, 20 bp, synthetic construct
  source 1..20: mol_type = other DNA
ctcaggcttgttaagctgtt

SEQ ID NO: 1633 - DNA, 20 bp, synthetic construct
  source 1..20: mol_type = other DNA
gacctcaggcttgttaagct

SEQ ID NO: 1634 - DNA, 20 bp, synthetic construct
  source 1..20: mol_type = other DNA
caagacctcaggcttgttaa

SEQ ID NO: 1635 - DNA, 20 bp, synthetic construct
  source 1..20: mol_type = other DNA
ctccaagacctcaggcttgt

SEQ ID NO: 1636 - DNA, 20 bp, synthetic construct
  source 1..20: mol_type = other DNA
cacctccaagacctcaggct

SEQ ID NO: 1637 - DNA, 20 bp, synthetic construct
  source 1..20: mol_type = other DNA
ggtcacctccaagacctcag

SEQ ID NO: 1638 - DNA, 20 bp, synthetic construct
  source 1..20: mol_type = other DNA
cagggtcacctccaagacct

SEQ ID NO: 1639 - DNA, 20 bp, synthetic construct
  source 1..20: mol_type = other DNA
gttcagggtcacctccaaga

SEQ ID NO: 1640 - DNA, 20 bp, synthetic construct
  source 1..20: mol_type = other DNA
gcggttcagggtcacctcca

SEQ ID NO: 1641 - DNA, 20 bp, synthetic construct
  source 1..20: mol_type = other DNA
acaggaatgggcggttcagg

SEQ ID NO: 1642 - DNA, 20 bp, synthetic construct
  source 1..20: mol_type = other DNA
caaacaggaatgggcggttc

SEQ ID NO: 1643 - DNA, 20 bp, synthetic construct
  source 1..20: mol_type = other DNA
cagcaaacaggaatgggcgg

SEQ ID NO: 1644 - DNA, 20 bp, synthetic construct
  source 1..20: mol_type = other DNA
acacagcaaacaggaatggg

SEQ ID NO: 1645 - DNA, 20 bp, synthetic construct
  source 1..20: mol_type = other DNA
catacacagcaaacaggaat

SEQ ID NO: 1646 - DNA, 20 bp, synthetic construct
  source 1..20: mol_type = other DNA
gatcatacacagcaaacagg

SEQ ID NO: 1647 - DNA, 20 bp, synthetic construct
  source 1..20: mol_type = other DNA
tttgatcatacacagcaaac

SEQ ID NO: 1648 - DNA, 20 bp, synthetic construct
  source 1..20: mol_type = other DNA
cgctttgatcatacacagca

SEQ ID NO: 1649 - DNA, 20 bp, synthetic construct
  source 1..20: mol_type = other DNA
gaagtgcagggcagtggcgc

SEQ ID NO: 1650 - DNA, 20 bp, synthetic construct
  source 1..20: mol_type = other DNA
caggaagtgcagggcagtgg

SEQ ID NO: 1651 - DNA, 20 bp, synthetic construct
  source 1..20: mol_type = other DNA
gcccaggaagtgcagggcag

SEQ ID NO: 1652 - DNA, 20 bp, synthetic construct
  source 1..20: mol_type = other DNA
gcggcccaggaagtgcaggg

SEQ ID NO: 1653 - DNA, 20 bp, synthetic construct
  source 1..20: mol_type = other DNA
cacgcggcccaggaagtgca

SEQ ID NO: 1654 - DNA, 20 bp, synthetic construct
  source 1..20: mol_type = other DNA
ggccacgcggcccaggaagt

SEQ ID NO: 1655 - DNA, 20 bp, synthetic construct
  source 1..20: mol_type = other DNA
gttggccacgcggcccagga

SEQ ID NO: 1656 - DNA, 20 bp, synthetic construct
  source 1..20: mol_type = other DNA
cgggttggccacgcggccca

SEQ ID NO: 1657 - DNA, 20 bp, synthetic construct
  source 1..20: mol_type = other DNA
cagcgggttggccacgcggc

SEQ ID NO: 1658 - DNA, 20 bp, synthetic construct
  source 1..20: mol_type = other DNA
gctcagcgggttggccacgc

SEQ ID NO: 1659 - DNA, 20 bp, synthetic construct
  source 1..20: mol_type = other DNA
tgtgctcagcgggttggcca

SEQ ID NO: 1660 - DNA, 20 bp, synthetic construct
  source 1..20: mol_type = other DNA
tgctgtgctcagcgggttgg

SEQ ID NO: 1661 - DNA, 20 bp, synthetic construct
  source 1..20: mol_type = other DNA
tcatgctgtgctcagcgggt

SEQ ID NO: 1662 - DNA, 20 bp, synthetic construct
  source 1..20: mol_type = other DNA
gcctcatgctgtgctcagcg

SEQ ID NO: 1663 - DNA, 20 bp, synthetic construct
  source 1..20: mol_type = other DNA
ctggcctcatgctgtgctca

SEQ ID NO: 1664 - DNA, 20 bp, synthetic construct
  source 1..20: mol_type = other DNA
gccctggcctcatgctgtgc

SEQ ID NO: 1665 - DNA, 20 bp, synthetic construct
  source 1..20: mol_type = other DNA
gccaggcactgtgttctggg

SEQ ID NO: 1666 - DNA, 20 bp, synthetic construct
  source 1..20: mol_type = other DNA
cttgccaggcactgtgttct

SEQ ID NO: 1667 - DNA, 20 bp, synthetic construct
  source 1..20: mol_type = other DNA
ggccttgccaggcactgtgt

SEQ ID NO: 1668 - DNA, 20 bp, synthetic construct
  source 1..20: mol_type = other DNA
aggagaaacggctgctttcc

SEQ ID NO: 1669 - DNA, 20 bp, synthetic construct
  source 1..20: mol_type = other DNA
ccaaggagaaacggctgctt

SEQ ID NO: 1670 - DNA, 20 bp, synthetic construct
  source 1..20: mol_type = other DNA
agaccaaggagaaacggctg

SEQ ID NO: 1671 - DNA, 20 bp, synthetic construct
  source 1..20: mol_type = other DNA
cttagaccaaggagaaacgg

SEQ ID NO: 1672 - DNA, 20 bp, synthetic construct
  source 1..20: mol_type = other DNA
acacttagaccaaggagaaa

SEQ ID NO: 1673 - DNA, 20 bp, synthetic construct
  source 1..20: mol_type = other DNA
agcacacttagaccaaggag

SEQ ID NO: 1674 - DNA, 20 bp, synthetic construct
  source 1..20: mol_type = other DNA
tgcagcacacttagaccaag

SEQ ID NO: 1675 - DNA, 20 bp, synthetic construct
  source 1..20: mol_type = other DNA
ccatgcagcacacttagacc

SEQ ID NO: 1676 - DNA, 20 bp, synthetic construct
  source 1..20: mol_type = other DNA
actccatgcagcacacttag

SEQ ID NO: 1677 - DNA, 20 bp, synthetic construct
  source 1..20: mol_type = other DNA
ctcactccatgcagcacact

SEQ ID NO: 1678 - DNA, 20 bp, synthetic construct
  source 1..20: mol_type = other DNA
cgctgcaggcttctactgct

SEQ ID NO: 1679 - DNA, 20 bp, synthetic construct
  source 1..20: mol_type = other DNA
tgccgctgcaggcttctact

SEQ ID NO: 1680 - DNA, 20 bp, synthetic construct
  source 1..20: mol_type = other DNA
ttgtgccgctgcaggcttct

SEQ ID NO: 1681 - DNA, 20 bp, synthetic construct
  source 1..20: mol_type = other DNA
catttgtgccgctgcaggct

SEQ ID NO: 1682 - DNA, 20 bp, synthetic construct
  source 1..20: mol_type = other DNA
gtgcatttgtgccgctgcag

SEQ ID NO: 1683 - DNA, 20 bp, synthetic construct
  source 1..20: mol_type = other DNA
gaggtgcatttgtgccgctg

SEQ ID NO: 1684 - DNA, 20 bp, synthetic construct
  source 1..20: mol_type = other DNA
tgggaggtgcatttgtgccg

SEQ ID NO: 1685 - DNA, 20 bp, synthetic construct
  source 1..20: mol_type = other DNA
aactgggaggtgcatttgtg

SEQ ID NO: 1686 - DNA, 20 bp, synthetic construct
  source 1..20: mol_type = other DNA
gcaaactgggaggtgcattt

SEQ ID NO: 1687 - DNA, 20 bp, synthetic construct
  source 1..20: mol_type = other DNA
ccagcaaactgggaggtgca

SEQ ID NO: 1688 - DNA, 20 bp, synthetic construct
  source 1..20: mol_type = other DNA
aacccagcaaactgggaggt

SEQ ID NO: 1689 - DNA, 20 bp, synthetic construct
  source 1..20: mol_type = other DNA
ataaacccagcaaactggga

SEQ ID NO: 1690 - DNA, 20 bp, synthetic construct
  source 1..20: mol_type = other DNA
aaaataaacccagcaaactg

SEQ ID NO: 1691 - DNA, 20 bp, synthetic construct
  source 1..20: mol_type = other DNA
tctaaaataaacccagcaaa

SEQ ID NO: 1692 - DNA, 20 bp, synthetic construct
  source 1..20: mol_type = other DNA
ttctctaaaataaacccagc

SEQ ID NO: 1693 - DNA, 20 bp, synthetic construct
  source 1..20: mol_type = other DNA
ccattctctaaaataaaccc

SEQ ID NO: 1694 - DNA, 20 bp, synthetic construct
  source 1..20: mol_type = other DNA
cccccattctctaaaataaa

SEQ ID NO: 1695 - DNA, 20 bp, synthetic construct
  source 1..20: mol_type = other DNA
ccacccccattctctaaaat

SEQ ID NO: 1696 - DNA, 20 bp, synthetic construct
  source 1..20: mol_type = other DNA
tccccacccccattctctaa

SEQ ID NO: 1697 - DNA, 20 bp, synthetic construct
  source 1..20: mol_type = other DNA
gcctccccacccccattctc

SEQ ID NO: 1698 - DNA, 20 bp, synthetic construct
  source 1..20: mol_type = other DNA
cttgcctccccacccccatt

SEQ ID NO: 1699 - DNA, 20 bp, synthetic construct
  source 1..20: mol_type = other DNA
gttcttgcctccccaccccc

SEQ ID NO: 1700 - DNA, 20 bp, synthetic construct
  source 1..20: mol_type = other DNA
ctggttcttgcctccccacc

SEQ ID NO: 1701 - DNA, 20 bp, synthetic construct
  source 1..20: mol_type = other DNA
acactggttcttgcctcccc

SEQ ID NO: 1702 - DNA, 20 bp, synthetic construct
  source 1..20: mol_type = other DNA
taaacactggttcttgcctc

SEQ ID NO: 1703 - DNA, 20 bp, synthetic construct
  source 1..20: mol_type = other DNA
cgctaaacactggttcttgc

SEQ ID NO: 1704 - DNA, 20 bp, synthetic construct
  source 1..20: mol_type = other DNA
ccgcgctaaacactggttct

SEQ ID NO: 1705 - DNA, 20 bp, synthetic construct
  source 1..20: mol_type = other DNA
gtcccgcgctaaacactggt

SEQ ID NO: 1706 - DNA, 20 bp, synthetic construct
  source 1..20: mol_type = other DNA
gtagtcccgcgctaaacact

SEQ ID NO: 1707 - DNA, 20 bp, synthetic construct
  source 1..20: mol_type = other DNA
acagtagtcccgcgctaaac

SEQ ID NO: 1708 - DNA, 20 bp, synthetic construct
  source 1..20: mol_type = other DNA
ggaacagtagtcccgcgcta

SEQ ID NO: 1709 - DNA, 20 bp, synthetic construct
  source 1..20: mol_type = other DNA
tttggaacagtagtcccgcg

SEQ ID NO: 1710 - DNA, 20 bp, synthetic construct
  source 1..20: mol_type = other DNA
ctttttggaacagtagtccc

SEQ ID NO: 1711 - DNA, 20 bp, synthetic construct
  source 1..20: mol_type = other DNA
attctttttggaacagtagt

SEQ ID NO: 1712 - DNA, 20 bp, synthetic construct
  source 1..20: mol_type = other DNA
ggaattctttttggaacagt

SEQ ID NO: 1713 - DNA, 20 bp, synthetic construct
  source 1..20: mol_type = other DNA
gttggaattctttttggaac

SEQ ID NO: 1714 - DNA, 20 bp, synthetic construct
  source 1..20: mol_type = other DNA
tcggttggaattctttttgg

SEQ ID NO: 1715 - DNA, 20 bp, synthetic construct
  source 1..20: mol_type = other DNA
tggtcggttggaattctttt

SEQ ID NO: 1716 - DNA, 20 bp, synthetic construct
  source 1..20: mol_type = other DNA
agctggtcggttggaattct

SEQ ID NO: 1717 - DNA, 20 bp, synthetic construct
  source 1..20: mol_type = other DNA
acaagctggtcggttggaat

SEQ ID NO: 1718 - DNA, 20 bp, synthetic construct
  source 1..20: mol_type = other DNA
caaacaagctggtcggttgg

SEQ ID NO: 1719 - DNA, 20 bp, synthetic construct
  source 1..20: mol_type = other DNA
tcacaaacaagctggtcggt

SEQ ID NO: 1720 - DNA, 20 bp, synthetic construct
  source 1..20: mol_type = other DNA
gtttcacaaacaagctggtc

SEQ ID NO: 1721 - DNA, 20 bp, synthetic construct
  source 1..20: mol_type = other DNA
tttgtttcacaaacaagctg

SEQ ID NO: 1722 - DNA, 20 bp, synthetic construct
  source 1..20: mol_type = other DNA
gaaaagggaacacttttttg

SEQ ID NO: 1723 - DNA, 20 bp, synthetic construct
  source 1..20: mol_type = other DNA
cttgaaaagggaacactttt

SEQ ID NO: 1724 - DNA, 20 bp, synthetic construct
  source 1..20: mol_type = other DNA
caacttgaaaagggaacact

SEQ ID NO: 1725 - DNA, 20 bp, synthetic construct
  source 1..20: mol_type = other DNA
tctcaacttgaaaagggaac

SEQ ID NO: 1726 - DNA, 20 bp, synthetic construct
  source 1..20: mol_type = other DNA
tgttctcaacttgaaaaggg

SEQ ID NO: 1727 - DNA, 20 bp, synthetic construct
  source 1..20: mol_type = other DNA
ttttgttctcaacttgaaaa

SEQ ID NO: 1728 - DNA, 20 bp, synthetic construct
  source 1..20: mol_type = other DNA
aatttttgttctcaacttga

SEQ ID NO: 1729 - DNA, 20 bp, synthetic construct
  source 1..20: mol_type = other DNA
cccaatttttgttctcaact

SEQ ID NO: 1730 - DNA, 20 bp, synthetic construct
  source 1..20: mol_type = other DNA
aaacccaatttttgttctca

SEQ ID NO: 1731 - DNA, 20 bp, synthetic construct
  source 1..20: mol_type = other DNA
ttaaaacccaatttttgttc

SEQ ID NO: 1732 - DNA, 20 bp, synthetic construct
  source 1..20: mol_type = other DNA
attttaaaacccaatttttg

SEQ ID NO: 1733 - DNA, 20 bp, synthetic construct
  source 1..20: mol_type = other DNA
ttaattttaaaacccaattt

SEQ ID NO: 1734 - DNA, 20 bp, synthetic construct
  source 1..20: mol_type = other DNA
tgcaaaaatgtatactttaa

SEQ ID NO: 1735 - DNA, 20 bp, synthetic construct
  source 1..20: mol_type = other DNA
caatgcaaaaatgtatactt

SEQ ID NO: 1736 - DNA, 20 bp, synthetic construct
  source 1..20: mol_type = other DNA
aggcaatgcaaaaatgtata

SEQ ID NO: 1737 - DNA, 20 bp, synthetic construct
  source 1..20: mol_type = other DNA
cgaaggcaatgcaaaaatgt

SEQ ID NO: 1738 - DNA, 20 bp, synthetic construct
  source 1..20: mol_type = other DNA
aaccgaaggcaatgcaaaaa

SEQ ID NO: 1739 - DNA, 20 bp, synthetic construct
  source 1..20: mol_type = other DNA
acaaaccgaaggcaatgcaa

SEQ ID NO: 1740 - DNA, 20 bp, synthetic construct
  source 1..20: mol_type = other DNA
aatacaaaccgaaggcaatg

SEQ ID NO: 1741 - DNA, 20 bp, synthetic construct
  source 1..20: mol_type = other DNA
ctaaatacaaaccgaaggca

SEQ ID NO: 1742 - DNA, 20 bp, synthetic construct
  source 1..20: mol_type = other DNA
acactaaatacaaaccgaag

SEQ ID NO: 1743 - DNA, 20 bp, synthetic construct
  source 1..20: mol_type = other DNA
aagacactaaatacaaaccg

SEQ ID NO: 1744 - DNA, 20 bp, synthetic construct
  source 1..20: mol_type = other DNA
ttcaagacactaaatacaaa

SEQ ID NO: 1745 - DNA, 20 bp, synthetic construct
  source 1..20: mol_type = other DNA
acattcaagacactaaatac

SEQ ID NO: 1746 - DNA, 20 bp, synthetic construct
  source 1..20: mol_type = other DNA
cttacattcaagacactaaa

SEQ ID NO: 1747 - DNA, 20 bp, synthetic construct
  source 1..20: mol_type = other DNA
gttcttacattcaagacact

SEQ ID NO: 1748 - DNA, 20 bp, synthetic construct
  source 1..20: mol_type = other DNA
catgttcttacattcaagac

SEQ ID NO: 1749 - DNA, 20 bp, synthetic construct
  source 1..20: mol_type = other DNA
ggtcatgttcttacattcaa

SEQ ID NO: 1750 - DNA, 20 bp, synthetic construct
  source 1..20: mol_type = other DNA
ggaggtcatgttcttacatt

SEQ ID NO: 1751 - DNA, 20 bp, synthetic construct
  source 1..20: mol_type = other DNA
cacggaggtcatgttcttac

SEQ ID NO: 1752 - DNA, 20 bp, synthetic construct
  source 1..20: mol_type = other DNA
ctacacggaggtcatgttct

SEQ ID NO: 1753 - DNA, 20 bp, synthetic construct
  source 1..20: mol_type = other DNA
acactacacggaggtcatgt

SEQ ID NO: 1754 - DNA, 20 bp, synthetic construct
  source 1..20: mol_type = other DNA
cagacactacacggaggtca

SEQ ID NO: 1755 - DNA, 20 bp, synthetic construct
  source 1..20: mol_type = other DNA
ttacagacactacacggagg

SEQ ID NO: 1756 - DNA, 20 bp, synthetic construct
  source 1..20: mol_type = other DNA
gtattacagacactacacgg

SEQ ID NO: 1757 - DNA, 20 bp, synthetic construct
  source 1..20: mol_type = other DNA
aaggtattacagacactaca

SEQ ID NO: 1758 - DNA, 20 bp, synthetic construct
  source 1..20: mol_type = other DNA
actaaggtattacagacact

SEQ ID NO: 1759 - DNA, 20 bp, synthetic construct
  source 1..20: mol_type = other DNA
aaaactaaggtattacagac

SEQ ID NO: 1760 - DNA, 20 bp, synthetic construct
  source 1..20: mol_type = other DNA
gaaaaaactaaggtattaca

SEQ ID NO: 1761 - DNA, 20 bp, synthetic construct
  source 1..20: mol_type = other DNA
gtggaaaaaactaaggtatt

SEQ ID NO: 1762 - DNA, 20 bp, synthetic construct
  source 1..20: mol_type = other DNA
tctgtggaaaaaactaaggt

SEQ ID NO: 1763 - DNA, 20 bp, synthetic construct
  source 1..20: mol_type = other DNA
gcatctgtggaaaaaactaa

SEQ ID NO: 1764 - DNA, 20 bp, synthetic construct
  source 1..20: mol_type = other DNA
caagcatctgtggaaaaaac

SEQ ID NO: 1765 - DNA, 20 bp, synthetic construct
  source 1..20: mol_type = other DNA
tcacaagcatctgtggaaaa

SEQ ID NO: 1766 - DNA, 20 bp, synthetic construct
  source 1..20: mol_type = other DNA
aaatcacaagcatctgtgga

SEQ ID NO: 1767 - DNA, 20 bp, synthetic construct
  source 1..20: mol_type = other DNA
caaaaatcacaagcatctgt

SEQ ID NO: 1768 - DNA, 20 bp, synthetic construct
  source 1..20: mol_type = other DNA
gttcaaaaatcacaagcatc

SEQ ID NO: 1769 - DNA, 20 bp, synthetic construct
  source 1..20: mol_type = other DNA
attgttcaaaaatcacaagc

SEQ ID NO: 1770 - DNA, 20 bp, synthetic construct
  source 1..20: mol_type = other DNA
cgtattgttcaaaaatcaca

SEQ ID NO: 1771 - DNA, 20 bp, synthetic construct
  source 1..20: mol_type = other DNA
aggtgcttgcatctttcacg

SEQ ID NO: 1772 - DNA, 20 bp, synthetic construct
  source 1..20: mol_type = other DNA
ttcaggtgcttgcatctttc

SEQ ID NO: 1773 - DNA, 20 bp, synthetic construct
  source 1..20: mol_type = other DNA
aaattcaggtgcttgcatct

SEQ ID NO: 1774 - DNA, 20 bp, synthetic construct
  source 1..20: mol_type = other DNA
cagaaattcaggtgcttgca

SEQ ID NO: 1775 - DNA, 20 bp, synthetic construct
  source 1..20: mol_type = other DNA
aaacagaaattcaggtgctt

SEQ ID NO: 1776 - DNA, 20 bp, synthetic construct
  source 1..20: mol_type = other DNA
ttcaaacagaaattcaggtg

SEQ ID NO: 1777 - DNA, 20 bp, synthetic construct
  source 1..20: mol_type = other DNA
gcattcaaacagaaattcag

SEQ ID NO: 1778 - DNA, 20 bp, synthetic construct
  source 1..20: mol_type = other DNA
tccgcattcaaacagaaatt

SEQ ID NO: 1779 - DNA, 20 bp, synthetic construct
  source 1..20: mol_type = other DNA
ggttccgcattcaaacagaa

SEQ ID NO: 1780 - DNA, 20 bp, synthetic construct
  source 1..20: mol_type = other DNA
tatggttccgcattcaaaca

SEQ ID NO: 1781 - DNA, 20 bp, synthetic construct
  source 1..20: mol_type = other DNA
agctatggttccgcattcaa

SEQ ID NO: 1782 - DNA, 20 bp, synthetic construct
  source 1..20: mol_type = other DNA
accagctatggttccgcatt

SEQ ID NO: 1783 - DNA, 20 bp, synthetic construct
  source 1..20: mol_type = other DNA
ataaccagctatggttccgc

SEQ ID NO: 1784 - DNA, 20 bp, synthetic construct
  source 1..20: mol_type = other DNA
gaaataaccagctatggttc

SEQ ID NO: 1785 - DNA, 20 bp, synthetic construct
  source 1..20: mol_type = other DNA
ggagaaataaccagctatgg

SEQ ID NO: 1786 - DNA, 20 bp, synthetic construct
  source 1..20: mol_type = other DNA
aagggagaaataaccagcta

SEQ ID NO: 1787 - DNA, 20 bp, synthetic construct
  source 1..20: mol_type = other DNA
cacaagggagaaataaccag

SEQ ID NO: 1788 - DNA, 20 bp, synthetic construct
  source 1..20: mol_type = other DNA
taacacaagggagaaataac

SEQ ID NO: 1789 - DNA, 20 bp, synthetic construct
  source 1..20: mol_type = other DNA
tactaacacaagggagaaat

SEQ ID NO: 1790 - DNA, 20 bp, synthetic construct
  source 1..20: mol_type = other DNA
tattactaacacaagggaga

SEQ ID NO: 1791 - DNA, 20 bp, synthetic construct
  source 1..20: mol_type = other DNA
gtttattactaacacaaggg

SEQ ID NO: 1792 - DNA, 20 bp, synthetic construct
  source 1..20: mol_type = other DNA
aggcttattgtggcaagacg

SEQ ID NO: 1793 - DNA, 20 bp, synthetic construct
  source 1..20: mol_type = other DNA
tggaggcttattgtggcaag

SEQ ID NO: 1794 - DNA, 20 bp, synthetic construct
  source 1..20: mol_type = other DNA
ttttggaggcttattgtggc

SEQ ID NO: 1795 - DNA, 20 bp, synthetic construct
  source 1..20: mol_type = other DNA
tttttttggaggcttattgt

SEQ ID NO: 1796 - DNA, 20 bp, synthetic construct
  source 1..20: mol_type = other DNA
actctcattgtggatgacga

SEQ ID NO: 1797 - DNA, 20 bp, synthetic construct
  source 1..20: mol_type = other DNA
aggtactctcattgtggatg

SEQ ID NO: 1798 - DNA, 20 bp, synthetic construct
  source 1..20: mol_type = other DNA
acaggtactctcattgtgga

SEQ ID NO: 1799 - DNA, 20 bp, synthetic construct
  source 1..20: mol_type = other DNA
gctcacaggtactctcattg

SEQ ID NO: 1800 - DNA, 20 bp, synthetic construct
  source 1..20: mol_type = other DNA
gcaccagctggtcctgtagg

SEQ ID NO: 1801 - DNA, 20 bp, synthetic construct
  source 1..20: mol_type = other DNA
tagcaccagctggtcctgta

SEQ ID NO: 1802 - DNA, 20 bp, synthetic construct
  source 1..20: mol_type = other DNA
ctagcaccagctggtcctgt

SEQ ID NO: 1803 - DNA, 20 bp, synthetic construct
  source 1..20: mol_type = other DNA
cgactagcaccagctggtcc

SEQ ID NO: 1804 - DNA, 20 bp, synthetic construct
  source 1..20: mol_type = other DNA
agcgactagcaccagctggt

SEQ ID NO: 1805 - DNA, 20 bp, synthetic construct
  source 1..20: mol_type = other DNA
ttgcagcgactagcaccagc

SEQ ID NO: 1806 - DNA, 20 bp, synthetic construct
  source 1..20: mol_type = other DNA
ttttgcagcgactagcacca

SEQ ID NO: 1807 - DNA, 20 bp, synthetic construct
  source 1..20: mol_type = other DNA
caagttttgcagcgactagc

SEQ ID NO: 1808 - DNA, 20 bp, synthetic construct
  source 1..20: mol_type = other DNA
ctgtcacagcctgcatgaac

SEQ ID NO: 1809 - DNA, 20 bp, synthetic construct
  source 1..20: mol_type = other DNA
tcctgtcacagcctgcatga

SEQ ID NO: 1810 - DNA, 20 bp, synthetic construct
  source 1..20: mol_type = other DNA
atcctgtcacagcctgcatg

SEQ ID NO: 1811 - DNA, 20 bp, synthetic construct
  source 1..20: mol_type = other DNA
tccatcctgtcacagcctgc

SEQ ID NO: 1812 - DNA, 20 bp, synthetic construct
  source 1..20: mol_type = other DNA
cttccatcctgtcacagcct

SEQ ID NO: 1813 - DNA, 20 bp, synthetic construct
  source 1..20: mol_type = other DNA
tcactccagtgctggaaggt

SEQ ID NO: 1814 - DNA, 20 bp, synthetic construct
  source 1..20: mol_type = other DNA
tgtcactccagtgctggaag

SEQ ID NO: 1815 - DNA, 20 bp, synthetic construct
  source 1..20: mol_type = other DNA
atgtcactccagtgctggaa

SEQ ID NO: 1816 - DNA, 20 bp, synthetic construct
  source 1..20: mol_type = other DNA
tggatgtcactccagtgctg

SEQ ID NO: 1817 - DNA, 20 bp, synthetic construct
  source 1..20: mol_type = other DNA
cctggatgtcactccagtgc

SEQ ID NO: 1818 - DNA, 20 bp, synthetic construct
  source 1..20: mol_type = other DNA
aaggagaaacggctgctttc

SEQ ID NO: 1819 - DNA, 20 bp, synthetic construct
  source 1..20: mol_type = other DNA
caaggagaaacggctgcttt

SEQ ID NO: 1820 - DNA, 20 bp, synthetic construct
  source 1..20: mol_type = other DNA
accaaggagaaacggctgct

SEQ ID NO: 1821 - DNA, 20 bp, synthetic construct
  source 1..20: mol_type = other DNA
gaccaaggagaaacggctgc

SEQ ID NO: 1822 - DNA, 20 bp, synthetic construct
  source 1..20: mol_type = other DNA
tagaccaaggagaaacggct

SEQ ID NO: 1823 - DNA, 20 bp, synthetic construct
  source 1..20: mol_type = other DNA
ttagaccaaggagaaacggc

SEQ ID NO: 1824 - DNA, 20 bp, synthetic construct
  source 1..20: mol_type = other DNA
acttagaccaaggagaaacg

SEQ ID NO: 1825 - DNA, 20 bp, synthetic construct
  source 1..20: mol_type = other DNA
cacttagaccaaggagaaac

SEQ ID NO: 1826 - DNA, 20 bp, synthetic construct
  source 1..20: mol_type = other DNA
cacacttagaccaaggagaa

SEQ ID NO: 1827 - DNA, 20 bp, synthetic construct
  source 1..20: mol_type = other DNA
gcacacttagaccaaggaga

SEQ ID NO: 1828 - DNA, 20 bp, synthetic construct
  source 1..20: mol_type = other DNA
cagcacacttagaccaagga

SEQ ID NO: 1829 - DNA, 20 bp, synthetic construct
  source 1..20: mol_type = other DNA
gcagcacacttagaccaagg

SEQ ID NO: 1830 - DNA, 20 bp, synthetic construct
  source 1..20: mol_type = other DNA
atgcagcacacttagaccaa

SEQ ID NO: 1831 - DNA, 20 bp, synthetic construct
  source 1..20: mol_type = other DNA
catgcagcacacttagacca

SEQ ID NO: 1832 - DNA, 20 bp, synthetic construct
  source 1..20: mol_type = other DNA
tccatgcagcacacttagac

SEQ ID NO: 1833 - DNA, 20 bp, synthetic construct
  source 1..20: mol_type = other DNA
ctccatgcagcacacttaga

SEQ ID NO: 1834 - DNA, 20 bp, synthetic construct
  source 1..20: mol_type = other DNA
cactccatgcagcacactta

SEQ ID NO: 1835 - DNA, 20 bp, synthetic construct
  source 1..20: mol_type = other DNA
tcactccatgcagcacactt

SEQ ID NO: 1836 - DNA, 20 bp, synthetic construct
  source 1..20: mol_type = other DNA
gctcactccatgcagcacac

SEQ ID NO: 1837 - DNA, 20 bp, synthetic construct
  source 1..20: mol_type = other DNA
ccgctgcaggcttctactgc

SEQ ID NO: 1838 - DNA, 20 bp, synthetic construct
  source 1..20: mol_type = other DNA
gccgctgcaggcttctactg

SEQ ID NO: 1839 - DNA, 20 bp, synthetic construct
  source 1..20: mol_type = other DNA
gtgccgctgcaggcttctac

SEQ ID NO: 1840 - DNA, 20 bp, synthetic construct
  source 1..20: mol_type = other DNA
tgtgccgctgcaggcttcta

SEQ ID NO: 1841 - DNA, 20 bp, synthetic construct
  source 1..20: mol_type = other DNA
tttgtgccgctgcaggcttc

SEQ ID NO: 1842 - DNA, 20 bp, synthetic construct
  source 1..20: mol_type = other DNA
atttgtgccgctgcaggctt

SEQ ID NO: 1843 - DNA, 20 bp, synthetic construct
  source 1..20: mol_type = other DNA
gcatttgtgccgctgcaggc

SEQ ID NO: 1844 - DNA, 20 bp, synthetic construct
  source 1..20: mol_type = other DNA
tgcatttgtgccgctgcagg

SEQ ID NO: 1845 - DNA, 20 bp, synthetic construct
  source 1..20: mol_type = other DNA
ggtgcatttgtgccgctgca

SEQ ID NO: 1846 - DNA, 20 bp, synthetic construct
  source 1..20: mol_type = other DNA
aggtgcatttgtgccgctgc

SEQ ID NO: 1847 - DNA, 20 bp, synthetic construct
  source 1..20: mol_type = other DNA
ggaggtgcatttgtgccgct

SEQ ID NO: 1848 - DNA, 20 bp, synthetic construct
  source 1..20: mol_type = other DNA
gggaggtgcatttgtgccgc

SEQ ID NO: 1849 - DNA, 20 bp, synthetic construct
  source 1..20: mol_type = other DNA
ctgggaggtgcatttgtgcc

SEQ ID NO: 1850 - DNA, 20 bp, synthetic construct
  source 1..20: mol_type = other DNA
actgggaggtgcatttgtgc

SEQ ID NO: 1851 - DNA, 20 bp, synthetic construct
  source 1..20: mol_type = other DNA
aaactgggaggtgcatttgt

SEQ ID NO: 1852 - DNA, 20 bp, synthetic construct
  source 1..20: mol_type = other DNA
caaactgggaggtgcatttg

SEQ ID NO: 1853 - DNA, 20 bp, synthetic construct
  source 1..20: mol_type = other DNA
agcaaactgggaggtgcatt

SEQ ID NO: 1854 - DNA, 20 bp, synthetic construct
  source 1..20: mol_type = other DNA
cagcaaactgggaggtgcat

SEQ ID NO: 1855 - DNA, 20 bp, synthetic construct
  source 1..20: mol_type = other DNA
cccagcaaactgggaggtgc

SEQ ID NO: 1856 - DNA, 20 bp, synthetic construct
  source 1..20: mol_type = other DNA
acccagcaaactgggaggtg

SEQ ID NO: 1857 - DNA, 20 bp, synthetic construct
  source 1..20: mol_type = other DNA
aataaacccagcaaactggg

SEQ ID NO: 1858 - DNA, 20 bp, synthetic construct
  source 1..20: mol_type = other DNA
aaataaacccagcaaactgg

SEQ ID NO: 1859 - DNA, 20 bp, synthetic construct
  source 1..20: mol_type = other DNA
taaaataaacccagcaaact

SEQ ID NO: 1860 - DNA, 20 bp, synthetic construct
  source 1..20: mol_type = other DNA
ctaaaataaacccagcaaac

SEQ ID NO: 1861 - DNA, 20 bp, synthetic construct
  source 1..20: mol_type = other DNA
ctctaaaataaacccagcaa

SEQ ID NO: 1862 - DNA, 20 bp, synthetic construct
  source 1..20: mol_type = other DNA
tctctaaaataaacccagca

SEQ ID NO: 1863 - DNA, 20 bp, synthetic construct
  source 1..20: mol_type = other DNA
attctctaaaataaacccag

SEQ ID NO: 1864 - DNA, 20 bp, synthetic construct
  source 1..20: mol_type = other DNA
cattctctaaaataaaccca

SEQ ID NO: 1865 - DNA, 20 bp, synthetic construct
  source 1..20: mol_type = other DNA
cccattctctaaaataaacc

SEQ ID NO: 1866 - DNA, 20 bp, synthetic construct
  source 1..20: mol_type = other DNA
ccccattctctaaaataaac

SEQ ID NO: 1867 - DNA, 20 bp, synthetic construct
  source 1..20: mol_type = other DNA
acccccattctctaaaataa

SEQ ID NO: 1868 - DNA, 20 bp, synthetic construct
  source 1..20: mol_type = other DNA
cacccccattctctaaaata

SEQ ID NO: 1869 - DNA, 20 bp, synthetic construct
  source 1..20: mol_type = other DNA
cccacccccattctctaaaa

SEQ ID NO: 1870 - DNA, 20 bp, synthetic construct
  source 1..20: mol_type = other DNA
ccccacccccattctctaaa

SEQ ID NO: 1871 - DNA, 20 bp, synthetic construct
  source 1..20: mol_type = other DNA
ctccccacccccattctcta

SEQ ID NO: 1872 - DNA, 20 bp, synthetic construct
  source 1..20: mol_type = other DNA
tgcctccccacccccattct

SEQ ID NO: 1873 - DNA, 20 bp, synthetic construct
  source 1..20: mol_type = other DNA
ttgcctccccacccccattc

SEQ ID NO: 1874 - DNA, 20 bp, synthetic construct
  source 1..20: mol_type = other DNA
tcttgcctccccacccccat

SEQ ID NO: 1875 - DNA, 20 bp, synthetic construct
  source 1..20: mol_type = other DNA
ggttcttgcctccccacccc

SEQ ID NO: 1876 - DNA, 20 bp, synthetic construct
  source 1..20: mol_type = other DNA
tggttcttgcctccccaccc

SEQ ID NO: 1877 - DNA, 20 bp, synthetic construct
  source 1..20: mol_type = other DNA
actggttcttgcctccccac

SEQ ID NO: 1878 - DNA, 20 bp, synthetic construct
  source 1..20: mol_type = other DNA
cactggttcttgcctcccca

SEQ ID NO: 1879 - DNA, 20 bp, synthetic construct
  source 1..20: mol_type = other DNA
aacactggttcttgcctccc

SEQ ID NO: 1880 - DNA, 20 bp, synthetic construct
  source 1..20: mol_type = other DNA
aaacactggttcttgcctcc

SEQ ID NO: 1881 - DNA, 20 bp, synthetic construct
  source 1..20: mol_type = other DNA
ctaaacactggttcttgcct

SEQ ID NO: 1882 - DNA, 20 bp, synthetic construct
  source 1..20: mol_type = other DNA
gctaaacactggttcttgcc

SEQ ID NO: 1883 - DNA, 20 bp, synthetic construct
  source 1..20: mol_type = other DNA
gcgctaaacactggttcttg

SEQ ID NO: 1884 - DNA, 20 bp, synthetic construct
  source 1..20: mol_type = other DNA
cgcgctaaacactggttctt

SEQ ID NO: 1885 - DNA, 20 bp, synthetic construct
  source 1..20: mol_type = other DNA
cccgcgctaaacactggttc

SEQ ID NO: 1886 - DNA, 20 bp, synthetic construct
  source 1..20: mol_type = other DNA
tcccgcgctaaacactggtt

SEQ ID NO: 1887 - DNA, 20 bp, synthetic construct
  source 1..20: mol_type = other DNA
agtcccgcgctaaacactgg

SEQ ID NO: 1888 - DNA, 20 bp, synthetic construct
  source 1..20: mol_type = other DNA
tagtcccgcgctaaacactg

SEQ ID NO: 1889 - DNA, 20 bp, synthetic construct
  source 1..20: mol_type = other DNA
agtagtcccgcgctaaacac

SEQ ID NO: 1890 - DNA, 20 bp, synthetic construct
  source 1..20: mol_type = other DNA
cagtagtcccgcgctaaaca

SEQ ID NO: 1891 - DNA, 20 bp, synthetic construct
  source 1..20: mol_type = other DNA
aacagtagtcccgcgctaaa

SEQ ID NO: 1892 - DNA, 20 bp, synthetic construct
  source 1..20: mol_type = other DNA
gaacagtagtcccgcgctaa

SEQ ID NO: 1893 - DNA, 20 bp, synthetic construct
  source 1..20: mol_type = other DNA
tggaacagtagtcccgcgct

SEQ ID NO: 1894 - DNA, 20 bp, synthetic construct
  source 1..20: mol_type = other DNA
ttggaacagtagtcccgcgc

SEQ ID NO: 1895 - DNA, 20 bp, synthetic construct
  source 1..20: mol_type = other DNA
ttttggaacagtagtcccgc

SEQ ID NO: 1896 - DNA, 20 bp, synthetic construct
  source 1..20: mol_type = other DNA
tttttggaacagtagtcccg

SEQ ID NO: 1897 - DNA, 20 bp, synthetic construct
  source 1..20: mol_type = other DNA
tctttttggaacagtagtcc

SEQ ID NO: 1898 - DNA, 20 bp, synthetic construct
  source 1..20: mol_type = other DNA
ttctttttggaacagtagtc

SEQ ID NO: 1899 - DNA, 20 bp, synthetic construct
  source 1..20: mol_type = other DNA
aattctttttggaacagtag

SEQ ID NO: 1900 - DNA, 20 bp, synthetic construct
  source 1..20: mol_type = other DNA
gaattctttttggaacagta

SEQ ID NO: 1901 - DNA, 20 bp, synthetic construct
  source 1..20: mol_type = other DNA
tggaattctttttggaacag

SEQ ID NO: 1902 - DNA, 20 bp, synthetic construct
  source 1..20: mol_type = other DNA
ttggaattctttttggaaca

SEQ ID NO: 1903 - DNA, 20 bp, synthetic construct
  source 1..20: mol_type = other DNA
ggttggaattctttttggaa

SEQ ID NO: 1904 - DNA, 20 bp, synthetic construct
  source 1..20: mol_type = other DNA
cggttggaattctttttgga

SEQ ID NO: 1905 - DNA, 20 bp, synthetic construct
  source 1..20: mol_type = other DNA
gtcggttggaattctttttg

SEQ ID NO: 1906 - DNA, 20 bp, synthetic construct
  source 1..20: mol_type = other DNA
ggtcggttggaattcttttt

SEQ ID NO: 1907 - DNA, 20 bp, synthetic construct
  source 1..20: mol_type = other DNA
ctggtcggttggaattcttt

SEQ ID NO: 1908 - DNA, 20 bp, synthetic construct
  source 1..20: mol_type = other DNA
gctggtcggttggaattctt

SEQ ID NO: 1909 - DNA, 20 bp, synthetic construct
  source 1..20: mol_type = other DNA
aagctggtcggttggaattc

SEQ ID NO: 1910 - DNA, 20 bp, synthetic construct
  source 1..20: mol_type = other DNA
caagctggtcggttggaatt

SEQ ID NO: 1911 - DNA, 20 bp, synthetic construct
  source 1..20: mol_type = other DNA
aacaagctggtcggttggaa

SEQ ID NO: 1912 - DNA, 20 bp, synthetic construct
  source 1..20: mol_type = other DNA
aaacaagctggtcggttgga

SEQ ID NO: 1913 - DNA, 20 bp, synthetic construct
  source 1..20: mol_type = other DNA
acaaacaagctggtcggttg

SEQ ID NO: 1914 - DNA, 20 bp, synthetic construct
  source 1..20: mol_type = other DNA
cacaaacaagctggtcggtt

SEQ ID NO: 1915 - DNA, 20 bp, synthetic construct
  source 1..20: mol_type = other DNA
ttcacaaacaagctggtcgg

SEQ ID NO: 1916 - DNA, 20 bp, synthetic construct
  source 1..20: mol_type = other DNA
tttcacaaacaagctggtcg

SEQ ID NO: 1917 - DNA, 20 bp, synthetic construct
  source 1..20: mol_type = other DNA
tgtttcacaaacaagctggt

SEQ ID NO: 1918 - DNA, 20 bp, synthetic construct
  source 1..20: mol_type = other DNA
ttgtttcacaaacaagctgg

SEQ ID NO: 1919 - DNA, 20 bp, synthetic construct
  source 1..20: mol_type = other DNA
ttttgtttcacaaacaagct

SEQ ID NO: 1920 - DNA, 20 bp, synthetic construct
  source 1..20: mol_type = other DNA
tttttgtttcacaaacaagc

SEQ ID NO: 1921 - DNA, 20 bp, synthetic construct
  source 1..20: mol_type = other DNA
aacttgaaaagggaacactt

SEQ ID NO: 1922 - DNA, 20 bp, synthetic construct
  source 1..20: mol_type = other DNA
tcaacttgaaaagggaacac

SEQ ID NO: 1923 - DNA, 20 bp, synthetic construct
  source 1..20: mol_type = other DNA
ctcaacttgaaaagggaaca

SEQ ID NO: 1924 - DNA, 20 bp, synthetic construct
  source 1..20: mol_type = other DNA
ttctcaacttgaaaagggaa

SEQ ID NO: 1925 - DNA, 20 bp, synthetic construct
  source 1..20: mol_type = other DNA
gttctcaacttgaaaaggga

SEQ ID NO: 1926 - DNA, 20 bp, synthetic construct
  source 1..20: mol_type = other DNA
ttgttctcaacttgaaaagg

SEQ ID NO: 1927 - DNA, 20 bp, synthetic construct
  source 1..20: mol_type = other DNA
tttgttctcaacttgaaaag

SEQ ID NO: 1928 - DNA, 20 bp, synthetic construct
  source 1..20: mol_type = other DNA
tttttgttctcaacttgaaa

SEQ ID NO: 1929 - DNA, 20 bp, synthetic construct
  source 1..20: mol_type = other DNA
atttttgttctcaacttgaa

SEQ ID NO: 1930 - DNA, 20 bp, synthetic construct
  source 1..20: mol_type = other DNA
caatttttgttctcaacttg

SEQ ID NO: 1931 - DNA, 20 bp, synthetic construct
  source 1..20: mol_type = other DNA
ccaatttttgttctcaactt

SEQ ID NO: 1932 - DNA, 20 bp, synthetic construct
  source 1..20: mol_type = other DNA
acccaatttttgttctcaac

SEQ ID NO: 1933 - DNA, 20 bp, synthetic construct
  source 1..20: mol_type = other DNA
aacccaatttttgttctcaa

SEQ ID NO: 1934 - DNA, 20 bp, synthetic construct
  source 1..20: mol_type = other DNA
taaaacccaatttttgttct

SEQ ID NO: 1935 - DNA, 20 bp, synthetic construct
  source 1..20: mol_type = other DNA
tttaaaacccaatttttgtt

SEQ ID NO: 1936 - DNA, 20 bp, synthetic construct
  source 1..20: mol_type = other DNA
aatgcaaaaatgtatacttt

SEQ ID NO: 1937 - DNA, 20 bp, synthetic construct
  source 1..20: mol_type = other DNA
gcaatgcaaaaatgtatact

SEQ ID NO: 1938 - DNA, 20 bp, synthetic construct
  source 1..20: mol_type = other DNA
aaggcaatgcaaaaatgtat

SEQ ID NO: 1939 - DNA, 20 bp, synthetic construct
  source 1..20: mol_type = other DNA
gaaggcaatgcaaaaatgta

SEQ ID NO: 1940 - DNA, 20 bp, synthetic construct
  source 1..20: mol_type = other DNA
ccgaaggcaatgcaaaaatg

SEQ ID NO: 1941 - DNA, 17 bp, synthetic construct
  source 1..17: mol_type = other DNA
catacccttctgctgta

SEQ ID NO: 1942 - DNA, 17 bp, synthetic construct
  source 1..17: mol_type = other DNA
ccgcatacccttctgct

SEQ ID NO: 1943 - DNA, 17 bp, synthetic construct
  source 1..17: mol_type = other DNA
tcgcttccgcataccct

SEQ ID NO: 1944 - DNA, 17 bp, synthetic construct
  source 1..17: mol_type = other DNA
tgctcgcttccgcatac

SEQ ID NO: 1945 - DNA, 17 bp, synthetic construct
  source 1..17: mol_type = other DNA
ctcattgtggatgacga

SEQ ID NO: 1946 - DNA, 17 bp, synthetic construct
  source 1..17: mol_type = other DNA
actctcattgtggatga

SEQ ID NO: 1947 - DNA, 17 bp, synthetic construct
  source 1..17: mol_type = other DNA
cagctgctcacaggtac

SEQ ID NO: 1948 - DNA, 17 bp, synthetic construct
  source 1..17: mol_type = other DNA
agcgactagcaccagct

SEQ ID NO: 1949 - DNA, 17 bp, synthetic construct
  source 1..17: mol_type = other DNA
cacagcctgcatgaacc

SEQ ID NO: 1950 - DNA, 17 bp, synthetic construct
  source 1..17: mol_type = other DNA
tcctgtcacagcctgca

SEQ ID NO: 1951 - DNA, 17 bp, synthetic construct
  source 1..17: mol_type = other DNA
ccatcctgtcacagcct

SEQ ID NO: 1952 - DNA, 17 bp, synthetic construct
  source 1..17: mol_type = other DNA
agtgctggaaggtgccc

SEQ ID NO: 1953 - DNA, 17 bp, synthetic construct
  source 1..17: mol_type = other DNA
gctggatcagcagcagg

SEQ ID NO: 1954 - DNA, 17 bp, synthetic construct
  source 1..17: mol_type = other DNA
ctgatgcggtcattgct

SEQ ID NO: 1955 - DNA, 17 bp, synthetic construct
  source 1..17: mol_type = other DNA
ggctctctctcatccgc

SEQ ID NO: 1956 - DNA, 17 bp, synthetic construct
  source 1..17: mol_type = other DNA
gtgggctctctctcatc

SEQ ID NO: 1957 - DNA, 17 bp, synthetic construct
  source 1..17: mol_type = other DNA
ccttgccaggcactgtg

SEQ ID NO: 1958 - DNA, 17 bp, synthetic construct
  source 1..17: mol_type = other DNA
gccttgccaggcactgt

SEQ ID NO: 1959 - DNA, 17 bp, synthetic construct
  source 1..17: mol_type = other DNA
aggccttgccaggcact

SEQ ID NO: 1960 - DNA, 17 bp, synthetic construct
  source 1..17: mol_type = other DNA
gaggccttgccaggcac

SEQ ID NO: 1961 - DNA, 17 bp, synthetic construct
  source 1..17: mol_type = other DNA
gctgctggcctttgcct

SEQ ID NO: 1962 - DNA, 17 bp, synthetic construct
  source 1..17: mol_type = other DNA
tatctgctgctggcctt

SEQ ID NO: 1963 - DNA, 17 bp, synthetic construct
  source 1..17: mol_type = other DNA
ttatctgctgctggcct

SEQ ID NO: 1964 - DNA, 17 bp, synthetic construct
  source 1..17: mol_type = other DNA
tgttatctgctgctggc

SEQ ID NO: 1965 - DNA, 17 bp, synthetic construct
  source 1..17: mol_type = other DNA
ttgttatctgctgctgg

SEQ ID NO: 1966 - DNA, 17 bp, synthetic construct
  source 1..17: mol_type = other DNA
gttgttatctgctgctg

SEQ ID NO: 1967 - DNA, 17 bp, synthetic construct
  source 1..17: mol_type = other DNA
atcgctgatttgtccgg

SEQ ID NO: 1968 - DNA, 17 bp, synthetic construct
  source 1..17: mol_type = other DNA
catcgctgatttgtccg

SEQ ID NO: 1969 - DNA, 17 bp, synthetic construct
  source 1..17: mol_type = other DNA
acatcgctgatttgtcc

SEQ ID NO: 1970 - DNA, 17 bp, synthetic construct
  source 1..17: mol_type = other DNA
cacatcgctgatttgtc

SEQ ID NO: 1971 - DNA, 17 bp, synthetic construct
  source 1..17: mol_type = other DNA
acacatcgctgatttgt

SEQ ID NO: 1972 - DNA, 17 bp, synthetic construct
  source 1..17: mol_type = other DNA
tgacacatcgctgattt

SEQ ID NO: 1973 - DNA, 17 bp, synthetic construct
  source 1..17: mol_type = other DNA
gtgacacatcgctgatt

SEQ ID NO: 1974 - DNA, 17 bp, synthetic construct
  source 1..17: mol_type = other DNA
cattagaagaaaaggtg

SEQ ID NO: 1975 - DNA, 17 bp, synthetic construct
  source 1..17: mol_type = other DNA
tcattagaagaaaaggt

SEQ ID NO: 1976 - DNA, 17 bp, synthetic construct
  source 1..17: mol_type = other DNA
cgactcattagaagaaa

SEQ ID NO: 1977 - DNA, 17 bp, synthetic construct
  source 1..17: mol_type = other DNA
gctcaaagtcgactcat

SEQ ID NO: 1978 - DNA, 17 bp, synthetic construct
  source 1..17: mol_type = other DNA
agctcaaagtcgactca

SEQ ID NO: 1979 - DNA, 17 bp, synthetic construct
  source 1..17: mol_type = other DNA
cagctcaaagtcgactc

SEQ ID NO: 1980 - DNA, 17 bp, synthetic construct
  source 1..17: mol_type = other DNA
ccagctcaaagtcgact

SEQ ID NO: 1981 - DNA, 17 bp, synthetic construct
  source 1..17: mol_type = other DNA
tccagctcaaagtcgac

SEQ ID NO: 1982 - DNA, 17 bp, synthetic construct
  source 1..17: mol_type = other DNA
ctttccagctcaaagtc

SEQ ID NO: 1983 - DNA, 17 bp, synthetic construct
  source 1..17: mol_type = other DNA
agaaacggctgctttcc

SEQ ID NO: 1984 - DNA, 17 bp, synthetic construct
  source 1..17: mol_type = other DNA
accaaggagaaacggct

SEQ ID NO: 1985 - DNA, 17 bp, synthetic construct
  source 1..17: mol_type = other DNA
gcatttgtgccgctgca

SEQ ID NO: 1986 - DNA, 17 bp, synthetic construct
  source 1..17: mol_type = other DNA
ggtgcatttgtgccgct

SEQ ID NO: 1987 - DNA, 17 bp, synthetic construct
  source 1..17: mol_type = other DNA
agcaaactgggaggtgc

SEQ ID NO: 1988 - DNA, 17 bp, synthetic construct
  source 1..17: mol_type = other DNA
ggttcttgcctccccac

SEQ ID NO: 1989 - DNA, 17 bp, synthetic construct
  source 1..17: mol_type = other DNA
ctaaacactggttcttg

SEQ ID NO: 1990 - DNA, 17 bp, synthetic construct
  source 1..17: mol_type = other DNA
gcgctaaacactggttc

SEQ ID NO: 1991 - DNA, 17 bp, synthetic construct
  source 1..17: mol_type = other DNA
aacagtagtcccgcgct

SEQ ID NO: 1992 - DNA, 17 bp, synthetic construct
  source 1..17: mol_type = other DNA
ggttggaattctttttg

SEQ ID NO: 1993 - DNA, 17 bp, synthetic construct
  source 1..17: mol_type = other DNA
ctggtcggttggaattc

SEQ ID NO: 1994 - DNA, 17 bp, synthetic construct
  source 1..17: mol_type = other DNA
acaaacaagctggtcgg

SEQ ID NO: 1995 - DNA, 17 bp, synthetic construct
  source 1..17: mol_type = other DNA
ttcacaaacaagctggt

SEQ ID NO: 1996 - DNA, 17 bp, synthetic construct
  source 1..17: mol_type = other DNA
acttgaaaagggaacac

SEQ ID NO: 1997 - DNA, 17 bp, synthetic construct
  source 1..17: mol_type = other DNA
tcaacttgaaaagggaa

SEQ ID NO: 1998 - DNA, 17 bp, synthetic construct
  source 1..17: mol_type = other DNA
ttctcaacttgaaaagg

SEQ ID NO: 1999 - DNA, 17 bp, synthetic construct
  source 1..17: mol_type = other DNA
caatttttgttctcaac

SEQ ID NO: 2000 - DNA, 17 bp, synthetic construct
  source 1..17: mol_type = other DNA
acccaatttttgttctc

SEQ ID NO: 2001 - DNA, 17 bp, synthetic construct
  source 1..17: mol_type = other DNA
atctgctgctggccttt

SEQ ID NO: 2002 - DNA, 17 bp, synthetic construct
  source 1..17: mol_type = other DNA
gttatctgctgctggcc

SEQ ID NO: 2003 - DNA, 17 bp, synthetic construct
  source 1..17: mol_type = other DNA
tcgctgatttgtccggg

SEQ ID NO: 2004 - DNA, 17 bp, synthetic construct
  source 1..17: mol_type = other DNA
acagtagtcccgcgcta

SEQ ID NO: 2005 - DNA, 17 bp, synthetic construct
  source 1..17: mol_type = other DNA
gaacagtagtcccgcgc

SEQ ID NO: 2006 - DNA, 17 bp, synthetic construct
  source 1..17: mol_type = other DNA
gttggaattctttttgg

SEQ ID NO: 2007 - DNA, 17 bp, synthetic construct
  source 1..17: mol_type = other DNA
cggttggaattcttttt

SEQ ID NO: 2008 - DNA, 17 bp, synthetic construct
  source 1..17: mol_type = other DNA
tggtcggttggaattct

SEQ ID NO: 2009 - DNA, 17 bp, synthetic construct
  source 1..17: mol_type = other DNA
gctggtcggttggaatt

SEQ ID NO: 2010 - DNA, 17 bp, synthetic construct
  source 1..17: mol_type = other DNA
caaacaagctggtcggt

SEQ ID NO: 2011 - DNA, 17 bp, synthetic construct
  source 1..17: mol_type = other DNA
cacaaacaagctggtcg

SEQ ID NO: 2012 - DNA, 18 bp, synthetic construct
  source 1..18: mol_type = other DNA
ttatctgctgctggcctt

SEQ ID NO: 2013 - DNA, 18 bp, synthetic construct
  source 1..18: mol_type = other DNA
ttgttatctgctgctggc

SEQ ID NO: 2014 - DNA, 18 bp, synthetic construct
  source 1..18: mol_type = other DNA
gttgttatctgctgctgg

SEQ ID NO: 2015 - DNA, 18 bp, synthetic construct
  source 1..18: mol_type = other DNA
atcgctgatttgtccggg

SEQ ID NO: 2016 - DNA, 18 bp, synthetic construct
  source 1..18: mol_type = other DNA
catcgctgatttgtccgg

SEQ ID NO: 2017 - DNA, 18 bp, synthetic construct
  source 1..18: mol_type = other DNA
acatcgctgatttgtccg

SEQ ID NO: 2018 - DNA, 18 bp, synthetic construct
  source 1..18: mol_type = other DNA
cacatcgctgatttgtcc

SEQ ID NO: 2019 - DNA, 18 bp, synthetic construct
  source 1..18: mol_type = other DNA
acacatcgctgatttgtc

SEQ ID NO: 2020 - DNA, 18 bp, synthetic construct
  source 1..18: mol_type = other DNA
cagctcaaagtcgactca

SEQ ID NO: 2021 - DNA, 18 bp, synthetic construct
  source 1..18: mol_type = other DNA
gaacagtagtcccgcgct

SEQ ID NO: 2022 - DNA, 18 bp, synthetic construct
  source 1..18: mol_type = other DNA
cggttggaattctttttg

SEQ ID NO: 2023 - DNA, 18 bp, synthetic construct
  source 1..18: mol_type = other DNA
gctggtcggttggaattc

SEQ ID NO: 2024 - DNA, 18 bp, synthetic construct
  source 1..18: mol_type = other DNA
acaaacaagctggtcggt

SEQ ID NO: 2025 - DNA, 18 bp, synthetic construct
  source 1..18: mol_type = other DNA
cacaaacaagctggtcgg

SEQ ID NO: 2026 - DNA, 18 bp, synthetic construct
  source 1..18: mol_type = other DNA
ggttggaattctttttgg

SEQ ID NO: 2027 - DNA, 18 bp, synthetic construct
  source 1..18: mol_type = other DNA
ccagctcaaagtcgactc

SEQ ID NO: 2028 - DNA, 18 bp, synthetic construct
  source 1..18: mol_type = other DNA
ggaacagtagtcccgcgc

SEQ ID NO: 2029 - DNA, 18 bp, synthetic construct
  source 1..18: mol_type = other DNA
tatctgctgctggccttt

SEQ ID NO: 2030 - DNA, 18 bp, synthetic construct
  source 1..18: mol_type = other DNA
tgttatctgctgctggcc

SEQ ID NO: 2031 - DNA, 18 bp, synthetic construct
  source 1..18: mol_type = other DNA
tcggttggaattcttttt

SEQ ID NO: 2032 - DNA, 19 bp, synthetic construct
  source 1..19: mol_type = other DNA
ttatctgctgctggccttt

SEQ ID NO: 2033 - DNA, 19 bp, synthetic construct
  source 1..19: mol_type = other DNA
ttgttatctgctgctggcc

SEQ ID NO: 2034 - DNA, 19 bp, synthetic construct
  source 1..19: mol_type = other DNA
gttgttatctgctgctggc

SEQ ID NO: 2035 - DNA, 19 bp, synthetic construct
  source 1..19: mol_type = other DNA
catcgctgatttgtccggg

SEQ ID NO: 2036 - DNA, 19 bp, synthetic construct
  source 1..19: mol_type = other DNA
acatcgctgatttgtccgg

SEQ ID NO: 2037 - DNA, 19 bp, synthetic construct
  source 1..19: mol_type = other DNA
cacatcgctgatttgtccg

SEQ ID NO: 2038 - DNA, 19 bp, synthetic construct
  source 1..19: mol_type = other DNA
acacatcgctgatttgtcc

SEQ ID NO: 2039 - DNA, 19 bp, synthetic construct
  source 1..19: mol_type = other DNA
cagctcaaagtcgactcat

SEQ ID NO: 2040 - DNA, 19 bp, synthetic construct
  source 1..19: mol_type = other DNA
aacagtagtcccgcgctaa

SEQ ID NO: 2041 - DNA, 19 bp, synthetic construct
  source 1..19: mol_type = other DNA
gaacagtagtcccgcgcta

SEQ ID NO: 2042 - DNA, 19 bp, synthetic construct
  source 1..19: mol_type = other DNA
cggttggaattctttttgg

SEQ ID NO: 2043 - DNA, 19 bp, synthetic construct
  source 1..19: mol_type = other DNA
gctggtcggttggaattct

SEQ ID NO: 2044 - DNA, 19 bp, synthetic construct
  source 1..19: mol_type = other DNA
cacaaacaagctggtcggt

SEQ ID NO: 2045 - DNA, 19 bp, synthetic construct
  source 1..19: mol_type = other DNA
tcacaaacaagctggtcgg

SEQ ID NO: 2046 - DNA, 19 bp, synthetic construct
  source 1..19: mol_type = other DNA
tatctgctgctggcctttg

SEQ ID NO: 2047 - DNA, 19 bp, synthetic construct
  source 1..19: mol_type = other DNA
tgttatctgctgctggcct

SEQ ID NO: 2048 - DNA, 19 bp, synthetic construct
  source 1..19: mol_type = other DNA
agctcaaagtcgactcatt

SEQ ID NO: 2049 - DNA, 19 bp, synthetic construct
  source 1..19: mol_type = other DNA
ggttggaattctttttgga

SEQ ID NO: 2050 - DNA, 19 bp, synthetic construct
  source 1..19: mol_type = other DNA
acaaacaagctggtcggtt

SEQ ID NO: 2051 - DNA, 19 bp, synthetic construct
  source 1..19: mol_type = other DNA
ccagctcaaagtcgactca